(19) United States
(12) Patent Application Publication
(10) Pub. No.: US 2011/0039327 A1
(43) Pub. Date: Feb. 17, 2011

(54) ORGANIC ACID PRODUCTION BY FUNGAL CELLS

(76) Inventors: Aaron Adriaan Winkler, The Hague (NL); Abraham Frederik De Hulster, Pijnacker (NL); Johannes Pieter Van Dijken, Leidschendam (NL); Jacobus Thomas Pronk, Schipluiden (NL); Joshua Trueheart, Concord, MA (US); Kevin T. Madden, Arlington, MA (US); Carlos Gancedo Rodriguez, Majadahonda (ES); Carmen-Lisset Flores Mauriz, Madrid (ES); Antonius Jeroen Adriaan Van Maris, Delft (NL); Jacob C. Harrison, W. Newton, MA (US)

Correspondence Address: FISH & RICHARDSON P.C. (BO), P.O. BOX 1022, MINNEAPOLIS, MN, 55440-1022, US

(21) Appl. No.: 12/600,559

(22) PCT Filed: May 19, 2008
(86) PCT No.: PCT/US2008/064103

§ 371 Date: Oct. 12, 2010

Related U.S. Application Data
(60) Provisional application No. 60/939,034, filed on May 18, 2007.

(51) Int. Cl. C12N 1/18

(52) U.S. Cl. 435/254.21

(57) ABSTRACT

Improved systems for the biological production of organic acids are described.

### BACKGROUND

[0001] Dicarboxylic acids are organic compounds that include two carboxylic acid groups. Such compounds find utility in a variety of commercial settings including, for example, in areas relating to food additives, polymer plasticizers, solvents, lubricants, engineered plastics, epoxy curing agents, adhesive and powder coatings, corrosion inhibitors, cosmetics, pharmaceuticals, electrolytes, etc.

[0002] Carboxylic acid groups, including those in dicarboxylic acids, are readily convertible into their ester forms. Such carboxylic acid esters are commonly employed in a variety of settings. For example, lower chain esters are often used as flavouring base materials, plasticizers, solvent carriers and/or coupling agents. Higher chain compounds are commonly used as components in metalworking fluids, surfactants, lubricants, detergents, oiling agents, emulsifiers, wetting agents textile treatments and emollients.

[0003] Carboxylic acid esters are also used as intermediates for the manufacture of a variety of target compounds. A wide range of physical properties (e.g., viscosities, specific gravities, vapor pressures, boiling points, etc.) can be achieved with different esters of the same carboxylic acid. It is therefore desirable to develop production systems for dicarboxylic acid compounds and/or their esters and/or anhydrides.

[0004] Many dicarboxylic acids, and particularly malic, fumaric, succinic, and tartaric acids, can be produced either by chemical synthesis or by fermentation. Currently, commercial scale production is typically performed by chemical synthesis or by extraction from biological sources (e.g. grape skins). Among other things, such chemical synthesis processes can generate large amounts of harmful wastes. There remains a need for the development of improved systems for producing organic acids such, as dicarboxylic acids. There is a particular need for the development of biological systems for achieving such production.

### SUMMARY

[0005] The present disclosure provides improved systems for the biological production of organic acids (e.g., dicarboxylic acids). For example, the present disclosure provides systems for the biological production of an organic acid selected from the group consisting of fumaric, malic acid, succinic acid, tartaric acid, and combinations thereof.

[0006] Described herein is a recombinant fungal cell having a genetic modification that decreases pyruvate decarboxylase (PDC) activity, wherein the recombinant fungal cell, when cultured under conditions that produce a C4 dicarboxylic acid, produces more of at least one C4 dicarboxylic acid than an otherwise identical fungal cell not having the genetic modification, in some cases, the recombinant fungal cell has a genetic modification that increases malate dehydrogenase (MDH) activity.

[0007] Also described herein is a recombinant fungal cell having a genetic modification that increases malate dehydrogenase (MDH) activity, wherein the recombinant fungal cell, when cultured under conditions that produce a C4 dicarboxylic acid, produces more of at least one C4 dicarboxylic acid than an otherwise identical fungal cell not having the genetic modification.

[0008] Also described is a recombinant fungal cell having a genetic modification such that the recombinant fungal cell can be cultured to produce at least 0.5 mole of at least one C4 dicarboxylic acid/liter of culture from a feedstock containing a carbon substrate that must be assimilated through at least a portion of the glycolytic pathway.

[0009] In some cases, the recombinant fungal cell has a modification selected from the group consisting of a modification that: a) increases anaplerotic activity; b) increases or decreases organic acid transport activity; c) increases or decreases glucose sensing and regulatory polypeptide activity; d) increases or decreases hexose transporter (HXT) activity; and e) increases or decreases C4 dicarboxylic acid biosynthetic activity.

[0010] In some cases, the recombinant fungal cell has a modification selected from the group consisting of a modification that: a) increases anaplerotic activity; b) decreases PDC activity; c) increases or decreases organic acid transport activity; d) increases or decreases glucose sensing and regulatory polypeptide activity; e) increases or decreases hexose transporter (HXT) activity; and f) increases or decreases C4 dicarboxylic biosynthetic activity.

[0011] In some cases, the recombinant fungal cell has a further modification selected from the group consisting of a modification that: a) increases anaplerotic activity; b) increases or decreases organic acid transport activity; c) increases or decreases glucose sensing and regulatory polypeptide activity; d) increases or decreases hexose transporter (HXT) activity; and e) increases or decreases C4 dicarboxylic biosynthetic activity.

[0012] In some cases, the recombinant fungal cell has a modification selected from the group consisting of a modification that: a) increases anaplerotic activity; b) decreases PDC activity; c) increases or decreases organic acid transport activity; d) increases or decreases glucose sensing and regulatory polypeptide activity; e) increases or decreases hexose transporter (HXT) activity; and f) increases or decreases C4 dicarboxylic biosynthetic activity.

[0013] Also described is a recombinant fungal cell having a genetic modification that increases pyruvate carboxylase (PYC) activity or a genetic modification that increases malate dehydrogenase (MDH) activity, and at least one modification selected from, the group consisting of a modification that: a) increases anaplerotic activity; b) decreases pyruvate decarboxylate (PDC) activity; c) increases or decreases organic acid transport activity; d) increases or decreases glucose sensing and regulatory polypeptide activity; e) increases or decreases hexose transporter (HXT) activity; and f) increases or decreases C4 dicarboxylic acid biosynthetic activity.

[0014] Also described is a recombinant fungal cell having a genetic modification selected from the group consisting of a modification that: a) increases anaplerotic activity; b) decreases PDC activity; c) increases or decreases organic acid transport activity; d) increases or decreases glucose sensing and regulatory polypeptide activity; e) increases or decreases hexose transporter (HXT) activity; and f) increases or decreases C4 dicarboxylic acid biosynthetic activity; and wherein said fungal cell can be cultured to produce at least 0.5 mole of C4 dicarboxylic acid per liter from a feedstock containing a carbon substrate that must be assimilated through at least a portion of the glycolytic pathway.

[0015] In some cases, the modification to increase anaplerotic activity comprises at least one modification selected from the group consisting of a modification that: a) increases pyruvate carboxylase (PYC) activity; b) increases, phosphoenolpyruvate carboxylase (PPC) activity; c) increases or decreases phosphoenolpyruvate carboxykinase (PCK) activity; d) increases or decreases pyruvate kinase (PYK) activity; e) increases biotin protein ligase (BPL) activity; f) increases biotin transport protein (VHT) activity; g) increases or decreases bicarbonate transport activity; and h) increases carbonic anhydrase activity.

[0016] In some cases, the modification to increase or decrease C4 dicarboxylic acid biosynthetic activity comprises at least one modification selected from the group consisting of a modification that: a) increases malate dehydrogenase (MDH) activity; b) increases or decreases fumarase activity; c) increases or decreases fumarate reductase activity; d) increases or decreases malate synthase activity; e) increases or decreases malic enzyme activity; f) increases or decreases isocitrate lyase activity; g) increases or decreases ATP-citrate lyase activity; and h) increases or decreases succinate dehydrogenase activity.

[0017] In various cases: the at least one modification comprises a genetic modification that increases PYC activity; the genetic modification is the addition of a gene encoding a PYC polypeptide; the genetic modification is a genetic modification that increases the transcription or translation of a gene encoding a PYC polypeptide; the at least one genetic modification increases activity by increasing expression of the PYC polypeptide to a level above that at which it is expressed in an otherwise identical fungus that lacks the at least one genetic modification; the PYC polypeptide is active in the cytosol; the PYC polypeptide is heterologous to the fungus; the PYC polypeptide has an amino acid sequence identical to that of a PYC-polypeptide from an organism of the Saccharomyces genus; the PYC polypeptide has an amino acid sequence identical to that of a Saccharomyces cerevisiae PYC polypeptide; the PYC polypeptide has at least 75% identity to SEQ ID NO:1 (PYC2); the PYC polypeptide has at least 95% identity to SEQ ID NO: 1 (PYC2); the PYC polypeptide has at least 75% identity to SEQ ID NO:61 (PYC1); the PYC polypeptide has at least 95% identity to SEQ ID NO:61 (PYC1); the PYC polypeptide has the amino sequence of a PYC2-ext polypeptide; the PYC polypeptide has at least 75% identity to SEQ ID NO:65 (PYC2-ext); the PYC polypeptide has at least 95% identity to SEQ ID NO:65 (PYC2-ext); the PYC polypeptide has the amino acid sequence of a Y. lipolytica PYC1 polypeptide; the PYC polypeptide has at least 75% identity to SEQ ID NO:67 (Y. lipolytica PYC1); the PYC polypeptide has at least 95% identity to SEQ ID NO:67 (Y. lipolytica PYC1); the PYC polypeptide has the amino acid sequence of an A. niger pycA polypeptide; the PYC polypeptide has at least 75% identify to SEQ ID NO:69 (A niger pycA); the PYC polypeptide has at least 95% identity to SEQ ID NO:69 (A. niger pycA); the PYC polypeptide has an amine acid sequence identical to that of a Nocardia sp. JS614 pycA polypeptide; the PYC polypeptide has at least 75% identity to SEQ ID NO:71 (Nocardia sp, JS614 pycA); the PYC polypeptide has at least 95% identity to SEQ ID NO:71 (Nocardia sp. JS614 pycA); the PYC polypeptide has the amino acid sequence of Methanothermobacter thermautotrophicus str. Delta H pycA polypeptide; the PYC polypeptide has at least 75% identity to SEQ ID NO:73 (Methanothermobacter thermautotrophicus str. Delta H pycA); the PYC polypeptide has at least 95% identity to SEQ ID NO:73 (Methanothermobacter thermautotrophicus str. Delta H pycA); the PYC polypeptide has the amino acid sequence of a Methanothermobacter thermautotrophicus str. Delta H pycB polypeptide; the PYC polypeptide has at least 75% identity to SEQ ID NO:75 (Methanothermobacter thermautotrophicus str. Delta H pyeB); the PYC polypeptide has at least 95% identity to SEQ ID NO:75 (Methanothermobacter thermautotrophicus str. Delta H pyeB); the PYC polypeptide has the amino acid sequence of a PYC polypeptide in FIG. 33; the PYC polypeptide has at least 75% identity to a PYC polypeptide in FIG. 33; the PYC polypeptide has at least 95% identity to a PYC polypeptide in FIG. 33.

[0018] In some cased, the at least one modification comprises a genetic modification that increases the activity of a phosphoenol pyruvate carboxylase (PPC) polypeptide as compared with its activity in an otherwise identical fungus lacking the modification; the genetic modification increases activity of the PPC by increasing its expression; the genetic modification is the addition of a gene encoding a PPC polypeptide; the genetic modification is the genetic modification that increases the transcription of a gene encoding a PPC polypeptide or increases translation of a gene encoding a PPC polypeptide; the fungus contains a modification to decrease sensitivity of the PPC polypeptide to inhibition by one more of malate, aspartate, and oxaloacetate; the PPC polypeptide is heterologous to the fungus; the PPC polypeptide has an amino acid sequence identical to that of a PPC polypeptide from an organism of the Escherichia genus; the PPC polypeptide has the amino acid sequence of an Escherichia coli PPC polypeptide the PPC polypeptide has at least 75% identity to SEQ ID NO:7 (E. coli PPC); the PPC polypeptide has at least 95% identity to SEQ ID NO:7 (E. coli PPC); the PPC polypeptide has an amino acid sequence identical to that of an Escherichia coli mut5-K620S Ppc polypeptide; the PPC polypeptide has at least 75% identity to SEQ ID NO:51 (Escherichia coli mut5-K620S Ppc); PPC polypeptide has at least 95% identity to SEQ ID NO:51 (Escherichia coli mut5-K620S Ppc); the PPC polypeptide has an amino acid sequence identical to that of an Escherichia coli mut10-K773G Ppc polypeptide; the PPC polypeptide has at least 75% identity to SEQ ID NO:53 (Escherichia coli mut10-K773G Ppc); the PPC polypeptide has at least 95% identity to SEQ ID NO:53 (Escherichia coli mut10-K773G Ppc); the PPC polypeptide has an amino acid sequence identical to that of an Erwinia carotovora Ppc polypeptide; the PPC polypeptide has at least 75% identity to SEQ ID NO:55 (Erwinia carotovora Ppc); the PPC polypeptide has at least 95% identity to SEQ ID NO:55 (Erwinia carotovora Ppc); the PPC polypeptide has an amino acid sequence identical to that of a (Thermo)synechococcus vulcanus Ppc polypeptide; the PPC polypeptide has at least 75% identity to SEQ ID NO:57 ((Thermo)synechococcus vulcanus Ppc); the PPC polypeptide has at least 95% identity to SEQ ID NO:57 ((Thermo)synechococcus vulcanus Ppc); the PPC polypeptide has an amino acid sequence identical to that of a Corynebacterium glutamicum Ppc polypeptide; the PPC polypeptide has at least 75% identity to SEQ ID NO:59 (Corynebacterium glutamicum Ppc); the PPC polypeptide has at least 95% identity to SEQ ID NO:59 (Corynebacterium glutamicum Ppc); the PPC polypeptide has the amino acid sequence of a PPC polypeptide in FIG. 32; the PPC polypeptide has at least 75% identity to a PPC polypeptide in FIG. 32; the PPC polypeptide has at least 95% identity to a PPC polypeptide in FIG. 32; the PPC polypeptide has at least 98% identity to a PPC polypeptide FIG. 32.

[0019] In some cases, the at least one modification comprises a genetic modification that increases or decreases the activity of a phosphoenol pyruvate carboxykinase (PCK) polypeptide as compared with its activity in an otherwise identical fungus lacking the modification; the genetic modification increases or decreases activity of the PCK polypeptide by increasing or decreasing its expression to a level above or below that at which it is expressed in an otherwise identical fungus that lacks the at least one genetic modification; the genetic modification that increases expression is the addition of a gene encoding a PCK polypeptide; the genetic modification that increases expression is a genetic modification that increases the transcription or translation of a gene encoding a PCK polypeptide; the genetic modification that decreases expression is the deletion of all or part of a gene encoding a PCK polypeptide or the disruption of a gene encoding a PCK polypeptide; the PCK polypeptide is heterologous to the fungus; the PCK polypeptide has the amino acid sequence of an Erwinia carotovora Pck polypeptide; the PCK polypeptide has at least 75% identity to SEQ ID NO:157 (Erwinia carotovora pckA); the PCK polypeptide has at least 95% identity to SEQ ID NO:157 (Erwinia carotovora pckA); the PCK polypeptide has the amino acid sequence of Actinobacillus pleuropneumoniae Pck polypeptide; the PCK polypeptide has at least 75% identity to SEQ ID NO:159 (Actinobacillus pleuropneumoniae pckA); the PCK polypeptide has at least 95% identity to SEQ ID NO:159 (Actinobacillus pleuropneumoniae pckA); the PCK polypeptide has the amino acid sequence of an (Actinobacillus succinogenes Pck polypeptide; the PCK polypeptide has at least 75% identity to SEQ ID NO:161 (Actinobacillus succinogenes pckA); the PCK polypeptide has at least 95% identity to SEQ ID NO:161 (Actinobacillus succinogenes pckA); the PCK polypeptide has the amino acid sequence of a Saccharomyces cerevisiae Pck polypeptide; the PCK polypeptide has at least 75% identity to SEQ ID NO:163 (Saccharomyces cerevisiae Pck1); the PCK polypeptide has at least 95% identity to SEQ ID NO:163 (Saccharomyces cerevisiae Pck1); the PCK polypeptide has an amino acid sequence identical to a PCK polypeptide in FIG. 36; the PCK polypeptide has at least 75% identity to a PCK polypeptide in FIG. 36; the PCK polypeptide has at least 95% identity to a PCK polypeptide in FIG. 36; the at least one modification comprises a genetic modification that increases BPL (biotin protein, ligase) activity; the at least one genetic modification increases activity by increasing expression of a BPL polypeptide to a level above that at which it is expressed in an otherwise identical fungus that lacks the at least one genetic modification; the genetic modification that increases expression is the addition of a gene encoding a BPL polypeptide; the genetic modification that increases expression. Is a genetic modification that increases the transcription or translation of a gene encoding a BPL polypeptide; the BPL polypeptide is heterologous to the fungus; the BPL polypeptide has an amino acid sequence identical to that of a BPL polypeptide from an organism of the Saccharomyces genus the BPL polypeptide has an amino acid sequence identical to that of a Saccharomyces cerevisiae BPL polypeptide; the BPL polypeptide has at least 75% identity to SEQ ID NO:95 (S. cerevisiae BPL1); the BPL polypeptide has at least 95% identity to SEQ ID NO:95 (S. cerevisiae BPL1); the BPL polypeptide has an amino acid sequence identical to a BPL polypeptide in FIG. 46; the BPL polypeptide has at least 75% identity to a BPL polypeptide in FIG. 46; the BPL polypeptide has at least 95% identity to a BPL polypeptide in FIG. 46.

[0020] In some cases, the at least one modification comprises a genetic modification that increases VHT activity; the at least one genetic modification increases activity by increasing expression of a VHT polypeptide to a level above that at which it is expressed in an otherwise identical fungus that lacks the at least one genetic modification; the genetic modification that increases expression is the addition of a gene encoding a VHT polypeptide; the genetic modification that increases expression is a genetic modification that increases the transcription or translation of a gene encoding a VHT polypeptide; the VHT polypeptide is heterologous to the fungus; the VHT polypeptide has an amino acid sequence identical to that of a VHT polypeptide from an organism of the Saccharomyces genus; the VHT polypeptide has an amino acid sequence identical to that of a Saccharomyces cerevisiae VHT polypeptide; the VHT polypeptide has at least 75% identity to SEQ ID NO:97 (S. cerevisiae VHT1); the VHT polypeptide has at least 95% identity to SEQ ID NO:97 (S. cerevisiae VHT1); the VHT polypeptide has an amino acid sequence identical to a VHT polypeptide in FIG. 48; the VHT polypeptide has at least 75% identity to a VHT polypeptide in FIG. 48; wherein the VHT polypeptide has at least 95% identity to a VHT polypeptide in FIG. 48; the at least one modification comprises a genetic modification that increases or decreases bicarbonate transport activity.

[0021] In some cases, the at least one genetic modification increases or decreases bicarbonate transport activity by increasing or decreasing expression of a bicarbonate transport polypeptide to a level above or below that at which it is expressed in an otherwise identical fungus that lacks the at least one genetic modification; the genetic modification that increases expression is the addition of a gene encoding a bicarbonate transport polypeptide; the genetic modification that increases expression is a genetic modification that increases the transcription or translation of a gene encoding a bicarbonate transport polypeptide; the genetic modification that decreases expression is the deletion of all or part of a gene encoding a bicarbonate transport polypeptide or the disruption of a gene encoding a bicarbonate transport polypeptide; the bicarbonate transport polypeptide is heterologous to the fungus; the bicarbonate transport polypeptide has an amino acid sequence identical to mat of a bicarbonate transport polypeptide from an organism of the Saccharomyces genus; the bicarbonate transport polypeptide has an amino acid sequence identical to that of a Saccharomyces cerevisiae bicarbonate transport polypeptide; the bicarbonate transport polypeptide has at least 75% identity to SEQ ID NO:89 (S. cerevisiae YNL275w); the bicarbonate transport polypeptide has at least 95% identity to SEQ ID NO:89 (S. cerevisiae YNL275 w); the bicarbonate transport polypeptide has an amino acid sequence identical to SEQ ID NO:91 (H. sapiens SLC4A1); the bicarbonate transport polypeptide has at least 75% identity to SEQ ID NO:91 (H. sapiens SLC4A1); the bicarbonate transport polypeptide has at least 95% identity to SEQ ID NO:91 (H. sapiens SLC4A1); the bicarbonate transport polypeptide has an amino acid sequence identical to SEQ ID NO:93 (Oryctolagus cuniculus SLC4A9); the bicarbonate transport polypeptide has at least 75% identity to SEQ ID NO:93 (Oryctolagus cuniculus SLC4A9); the bicarbonate transport polypeptide has at least 95% identity to SEQ ID NO:93 (Oryctolagus cuniculus SLC4A9); the bicarbonate transport polypeptide has an amino acid sequence identical to a bicarbonate transport polypeptide in FIG. 39; the bicarbonate transport polypeptide has at least 75% identity to a bicarbonate transport polypeptide in FIG. 39; the bicarbonate transport polypeptide has at least 95% identity to a bicarbonate transport polypeptide in FIG. 39.

[0022] In some cases, the at least one modification comprises a genetic modification that increases carbonic anhydrase activity; the at least one genetic modification increases carbonic anhydrase activity by increasing expression of the carbonic anhydrase polypeptide to a level above that at which it is expressed in an otherwise identical fungus that lacks the at least one genetic modification; the genetic modification that increases expression is fee addition of a gene encoding a carbonic anhydrase polypeptide; the genetic modification mat increases expression is a genetic modification that increases the transcription or translation of a gene encoding a carbonic anhydrase polypeptide; the carbonic anhydrase polypeptide is heterologous to the fungus; the carbonic anhydrase polypeptide has an amino acid sequence identical to that of a carbonic anhydrase polypeptide from an organism of the Saccharomyces genus; the carbonic anhydrase polypeptide has an amino acid sequence identical to that of a Saccharomyces cerevisiae carbonic anhydrase polypeptide; the carbonic anhydrase polypeptide has at least 75% identity to SEQ ID NO:99 (S. cerevisiae NCE103); the carbonic anhydrase polypeptide has at least 95% identity to SEQ ID NO:99 (S. cerevisiae NCE103); the carbonic anhydrase polypeptide has an amino acid sequence identical to a carbonic anhydrase polypeptide in FIG. 40; the carbonic anhydrase polypeptide has at least 75% identity to a carbonic anhydrase polypeptide in FIG. 40; the carbonic anhydrase polypeptide has at least 95% identity to a carbonic anhydrase polypeptide in FIG. 40.

[0023] In some cases, the at least one modification comprises a genetic modification that increases MDH activity; the genetic, modification increases activity by increasing expression of the MDH; the genetic modification that increases expression is the addition of a gene encoding a MDH polypeptide; the genetic modification that increases expression is a genetic modification that increases the transcription or translation of a gene encoding a MDH polypeptide; the MDH polypeptide is active in the cytosol; the MDH polypeptide is targeted to the cytosol of the fungal cell by modification of its coding region; the fungal cell contains a modification that decreases sensitivity of the MDH polypeptide to inhibition in the presence of glucose; the fungal cell, has at least 2-fold the MDH polypeptide activity in the presence of glucose, when, compared to an otherwise identical parental strain lacking the modification that decreases, sensitivity of the MDH polypeptide to inhibition in the presence of glucose; the MDH polypeptide is heterologous to the fungal cell; the MDH polypeptide has an amino acid sequence identical to that of an MDH polypeptide from an organism of the Saccharomyces genus; the MDH polypeptide has an amino acid sequence identical to that of a Saccharomyces cerevisiae MDH polypeptide; the MDH polypeptide is selected from the group consisting of: MDH1, MDH2, or MDH3 and combinations thereof; the MDH polypeptide has an amino acid sequence identical to that of an S. cerevisiae MDH1 polypeptide; the MDH1 polypeptide has at least 75% identity to SEQ ID NO:9 (S.c. MDH1); the MDH1 polypeptide has at least 95% identity to SEQ ID NO:9 (S.c. MDH1); the MDH polypeptide has an amino acid sequence identical to mat of an S. cerevisiae MDH2 polypeptide; the MDH2 polypeptide has at least 75% identity to SEQ ID NO:11 (S.c. MDH2); the MDH2 polypeptide has at least 95% identity to SEQ ID NO:11 (S.c. MDH2); the MDH polypeptide has an amino acid sequence identical to that of an S. cerevisiae MDH3 polypeptide; the MDH3 polypeptide has at least 75% identity to SEQ ID NO:15 (S.c. MDH3); the MDH3 polypeptide has at least 95% identity to SEQ ID NO:15 (S.c. MDH3); the MDH polypeptide has an amino acid sequence identical to that of a MDH2 P2S polypeptide; the MDH polypeptide has at least 75% identity to SEQ ID NO:13 (MDH2 P2S); the MDH polypeptide has at least 95% identity to SEQ ID NO:13 (MDH2 P2S); the MDH polypeptide has an amino acid sequence identical to that of an Actinobacillus succinogenes MDH polypeptide; the MDH polypeptide has at least 75% identity to SEQ ID NO:19 (Actinobacillus succinogenes MDH); the MDH polypeptide has at least 95% identity to SEQ ID NO:19 (Actinobacillus succinogenes MDH), the MDH polypeptide has an amino acid sequence identical to that of a Yarrowia lipolytica MDH polypeptide; the MDH polypeptide has at least 75% identity to SEQ ID NO:21 (Yarrowia lipolytica MDH); the MDH polypeptide has at least 95% identity to SEQ ID NO:21 (Yarrowia lipolytica MDH); the MDH polypeptide has an amino acid sequence identical to that of an Aspergillus niger MDH polypeptide; the MDH polypeptide has at least 75% identity to SEQ ID NO:23 (Aspergillus niger MDH); the MDH polypeptide has at least 95% identity to SEQ ID NO:23 (Aspergillus niger MDH); the MDH polypeptide has an amino acid sequence identical to that of an MDH polypeptide in FIG. 34; the MDH polypeptide has at least 75% identity to a MDH polypeptide in FIG. 34; the MDH polypeptide has at least 95% identity to a MDH polypeptide in FIG. 34; the MDH polypeptide has MDH3ΔSKL.

[0024] In some cases, the at least one modification comprises a genetic modification that increases or decreases fumarase activity; the at least one genetic modification increases activity by increasing or decreasing expression of a fumarase polypeptide to a level above or below that at which it is expressed in an otherwise identical fungus that lacks the at least one genetic modification; the genetic modification that increases expression is the addition of a gene encoding a fumarase polypeptide; the genetic modification that increases expression is a genetic modification that increases the transcription or translation of a gene encoding a fumarase polypeptide; the genetic modification that decreases expression is the deletion of all or part of a gene encoding a fumarase polypeptide or the disruption of a gene encoding a fumarase polypeptide; the fumarase polypeptide is heterologous to the fungus; the fumarase polypeptide has an amino acid sequence identical to that of a fumarase polypeptide from an organism of the Saccharomyces genus; the fumarase polypeptide has an amino acid sequence identical to that of a Saccharomyces cerevisiae fumarase polypeptide; the fumarase polypeptide has at least 75% identity to SEQ ID NO:101 (S. cerevisiae FUM1); the fumarase polypeptide has at least 95% identity to SEQ ID NO:101 (S. cerevisiae FUM1); the fumarase polypeptide has an amino acid sequence identical to a fumarase polypeptide in FIG. 43; the fumarase polypeptide has at least 75% identity to a fumarase polypeptide in FIG. 43; the fumarase polypeptide has at least 95% identity to a fumarase polypeptide in FIG. 43.

[0025] In some cases, the at least one modification comprises a genetic modification that increases or decreases fumarate reductase activity; the at least one genetic modification increases activity by increasing or decreasing expression of the fumarate reductase polypeptide to a level above or below that at which it is expressed in an otherwise identical fungus that lacks the at least one genetic modification; the genetic modification that increases expression is the addition of a gene encoding a fumarate reductase polypeptide; the genetic modification that increases expression is a genetic modification that increases the transcription or translation of a gene encoding a fumarate reductase polypeptide; the genetic modification that decreases expression is the deletion of all or part of a gene encoding a fumarase reductase polypeptide or the disruption of a gene encoding a fumarate reductase polypeptide; the fumarate reductase polypeptide is heterologous to the fungus; the fumarate reductase polypeptide has an amino acid sequence identical to that of a fumarate reductase polypeptide from an organism of the Saccharomyces genus; the fumarate reductase polypeptide has an amino acid sequence identical to that of a Saccharomyces cerevisiae fumarate reductase polypeptide; the fumarate reductase polypeptide has at least 75% identity to SEQ ID NO:103 (S. cerevisiae OSM1); the fumarate reductase polypeptide has at least 95% identity to SEQ ID NO:103 (S. cerevisiae OSM1); the fumarate reductase polypeptide has at least 75% identity to SEQ ID NO:105 (S. cerevisiae FRDS1); the fumarate reductase polypeptide has at least 95% identity to SEQ ID NO:105 (S. cerevisiae FRDS1); the fumarate reductase polypeptide has an amino acid sequence identical to a fumarate reductase polypeptide in FIG. 42; the fumarate reductase polypeptide has at least 75% identity to a fumarate reductase polypeptide in FIG. 42; the fumarate reductase polypeptide has at least 95% identity to a fumarate reductase polypeptide in FIG. 42.

[0026] In some cases, the at least one modification comprises a genetic modification that increases or decreases malate synthase activity; the at least, one genetic modification increases activity by increasing or decreasing expression of a malate synthase polypeptide to a level above or below that at which it is expressed in an otherwise identical fungus that lacks the at least one genetic modification the genetic modification that increases expression is the addition of a gene encoding a malate synthase polypeptide; the genetic modification that increases expression is a genetic modification that increases the transcription or translation of a gene encoding a malate synthase polypeptide; the genetic modification that decreases expression is the deletion of all or part of a gene encoding a malate synthase polypeptide or the disruption of a gene encoding a malate synthase polypeptide; the malate synthase polypeptide is heterologous to the fungus; the malate synthase polypeptide has an amino acid sequence identical to that of a malate synthase polypeptide from an organism of the Saccharomyces genus; the malate synthase polypeptide has an amino acid sequence identical to that of a Saccharomyces cerevisiae malate synthase polypeptide; the malate synthase polypeptide has at least 75% identity to SEQ ID NO:151 (S. cerevisiae MLS1); the malate synthase polypeptide has at least 95% identity to SEQ ID NO:151 (S. cerevisiae MLS1); the malate synthase polypeptide has an amino acid sequence identical to that of a Saccharomyces cerevisiae DAL7 polypeptide; the malate synthase polypeptide has at least 75% identity to SEQ ID NO:153 (S. cerevisiae DAL7); the malate synthase polypeptide has at least 95% identity to SEQ ID NO:153 (S. cerevisiae DAL7); the malate synthase polypeptide has an amino acid sequence identical to a malate synthase polypeptide in FIG. 37; the malate synthase polypeptide has at least 75% identity to a malate synthase polypeptide in FIG. 37; the malate synthase polypeptide has at least 95% identity to a malate synthase polypeptide in FIG. 37.

[0027] In some cases, the at least one modification comprises a genetic modification that increases or decreases malic enzyme activity; the at least one genetic modification increases activity by increasing or decreasing expression of a malic enzyme polypeptide to a level above or below that at which, it is expressed in an otherwise identical fungus that lacks the at least one genetic modification; the genetic modification that increases expression is the addition of a gene encoding a malic enzyme polypeptide; the genetic modification that increases expression is a genetic modification mat increases the transcription or translation of a gene encoding a malic enzyme polypeptide; the genetic modification that decreases expression is the deletion of all or part of a gene encoding a malic enzyme polypeptide or the disruption of a gene encoding a malic enzyme polypeptide; the malic enzyme polypeptide is heterologous to the fungus; the malic enzyme polypeptide has an amino acid sequence identical to that of a malic enzyme polypeptide from an organism of fee Saccharomyces genus; the malic enzyme polypeptide has an amino acid sequence identical to that of a Saccharomyces cerevisiae malic enzyme polypeptide; the malic enzyme polypeptide has at least 75% identity to SEQ ID NO:155 (S. cerevisiae MAE1); the malic enzyme polypeptide has at least 95% identity to SEQ ID NO:155 (S. cerevisiae MAE1); the malic enzyme polypeptide has an amino acid sequence identical to a malic enzyme polypeptide in FIG. 38; the malic enzyme polypeptide has at least 75% identity to a malic enzyme polypeptide in FIG. 38; the malic enzyme polypeptide has at least 95% identify to a malic enzyme polypeptide in FIG. 38.

[0028] In some cases, the at least one modification comprises a genetic modification that increases or decreases isocitrate lyase activity; the at least one genetic modification increases activity by increasing or decreasing expression of a isocitrate lyase polypeptide to a level above or below that at which it is expressed in an otherwise identical fungus that lacks the at least one genetic modification; the genetic modification that increases expression is the addition of a gene encoding an isocitrate lyase polypeptide; the genetic modification that increases expression is a genetic modification that increases the transcription or translation of a gene encoding an isocitrate lyase polypeptide; the genetic modification that decreases expression is the deletion of all or part of a gene encoding an isocitrate lyase polypeptide or the disruption of a gene encoding an isocitrate lyase polypeptide; the isocitrate lyase polypeptide is heterologous to the fungus; the isocitrate lyase polypeptide has an amino acid sequence identical to that of an isocitrate lyase polypeptide from an organism of the Saccharomyces genus; the isocitrate lyase polypeptide has an amino acid sequence identical to that of a Saccharomyces cerevisiae isocitrate lyase polypeptide; the isocitrate lyase polypeptide has at least 75% identity to SEQ ID NO:149 S. cerevisiae ICL1); the isocitrate lyase polypeptide has at least 95% identity to SEQ ID NO:149 (S. cerevisiae ICL1); the isocitrate lyase polypeptide has an amino acid sequence identical to an isocitrate lyase polypeptide in FIG. 49; the isocitrate lyase polypeptide has at least 75% identity to an isocitrate lyase polypeptide in FIG. 49; the isocitrate lyase polypeptide has at least 95% identity to an isocitrate lyase polypeptide in FIG. 49.

[0029] In some cases, the at least one modification comprises a genetic modification that increases or decreases ATP-citrate lyase activity; the at least one genetic modification increases activity by increasing or decreasing expression of an ATP-citrate lyase polypeptide to a level above or below that at which it is expressed in an otherwise identical fungus that lacks the at least one genetic modification; the genetic modification that increases expression is the addition of a gene encoding an ATP-citrate lyase polypeptide; the genetic modification that increases expression is a genetic modification that increases the transcription or translation of a gene encoding an ATP-citrate lyase polypeptide; the genetic modification that decreases expression is the deletion of all or part of a gene encoding an ATP-citrate lyase polypeptide or the disruption of a gene encoding an ATP-citrate lyase polypeptide; the ATP-citrate lyase polypeptide is heterologous to the fungus; the ATP-citrate lyase polypeptide has an amino acid sequence identical to that of an ATP-citrate lyase polypeptide from an organism of the Saccharomyces genus; the ATP-citrate lyase polypeptide has an amino acid sequence identical to SEQ ID NO:85 (Y. lipolytica subunit 1 (XP_{—}504787)); the ATP-citrate lyase polypeptide has at least 75% identity to SEQ ID NO:85 (Y. lipolytica subunit 1 (XP_{—}504787)); the ATP-citrate lyase polypeptide has at least 95% identity to SEQ ID NO:85 (Y. lipolytica subunit 1 (XP_{—}504787)); the ATP-citrate lyase polypeptide has an amino acid sequence identical to SEQ ID NO:85 (Y. lipolytica subunit 1 (XP_{—}503231)); the ATP-citrate lyase polypeptide has at least 75% identity to SEQ ID NO:87 (Y. lipolytica subunit 2 (XP_{—}503231)); the ATP-citrate lyase polypeptide has at least 95% identity to SEQ ID NO:87 (Y. lipolytica subunit 2 (XP_{—}503231)); the ATP-citrate lyase polypeptide has an amino acid sequence identical to an ATP-citrate lyase polypeptide in FIG. 41a or FIG. 41b1 the ATP-citrate lyase polypeptide has at least 75% identity to an ATP-citrate lyase polypeptide in FIG. 41a or FIG. 41b; the ATP-citrate lyase polypeptide has at least 95% identity to an ATP-citrate lyase polypeptide in FIG. 41a or FIG. 41b.

[0030] In some cases, the at least one modification comprises a genetic modification that increases or decreases succinate dehydrogenase activity; the at least one genetic modification increases activity by increasing or decreasing expression of a succinate dehydrogenase polypeptide to a level above or below that at which it is expressed in an otherwise identical fungus that lacks the at bast one genetic modification; the genetic modification that increases expression is the addition of a gene encoding a succinate dehydrogenase polypeptide; the genetic modification that increases expression is a genetic modification that increases the transcription or translation of a gene encoding a succinate dehydrogenase polypeptide; fee genetic modification that decreases expression is the deletion of all or part of a gene encoding a succinate dehydrogenase polypeptide or the disruption of a gene encoding a succinate dehydrogenase polypeptide; the succinate dehydrogenase polypeptide is heterologous to the fungus; the succinate dehydrogenase polypeptide has an amino acid sequence identical to that of a succinate dehydrogenase polypeptide from an organism of the Saccharomyces genus; the succinate dehydrogenase polypeptide has at least 75% identity to SEQ ID NO:169 (S. cerevisiae SDH1); the succinate dehydrogenase polypeptide has at least 95% identity to SEQ ID NO:169 (S. cerevisiae SDH1); the succinate dehydrogenase polypeptide has at least 75% identity to SEQ ID NO:171 (S. cerevisiae SDH2); the succinate dehydrogenase polypeptide has at least 95% identity to SEQ ID NO:171 (S. cerevisiae SDH2); the succinate dehydrogenase polypeptide has at least 75% identity to SEQ ID NO: 173 (S. cerevisiae SDH3); the succinate dehydrogenase polypeptide has at least 95% identity to SEQ ID NO:173 (S. cerevisiae SDH3); the succinate dehydrogenase polypeptide has at least 75% identity to SEQ ID NO:175 (S. cerevisiae SDH4); the succinate dehydrogenase polypeptide has at least 95% identity to SEQ ID NO:175 (S. cerevisiae SDH4); the succinate dehydrogenase polypeptide has an amino acid sequence identical to a succinate dehydrogenase polypeptide in FIG. 47; the succinate dehydrogenase polypeptide has at least 75% identity to a succinate dehydrogenase polypeptide in FIG. 47; the succinate dehydrogenase polypeptide has at least 95% identity to a succinate dehydrogenase polypeptide in FIG. 47.

[0031] In some cases, the at least one modification comprises a genetic modification that increases or decreases pyruvate kinase activity; the at least one genetic modification increases activity by increasing or decreasing expression of a pyruvate kinase polypeptide to a level above or below that at which it is expressed in an otherwise identical fungus that lacks the at least one genetic modification; the genetic modification that increases expression is the addition of a gene encoding a pyruvate kinase polypeptide; the genetic modification that increases expression is a genetic modification that increases the transcription or translation of a gene encoding a pyruvate kinase polypeptide; the genetic modification that decreases expression is the deletion of all or part of a gene encoding a pyruvate kinase polypeptide or the disruption of a gene encoding a pyruvate kinase polypeptide; the pyruvate kinase polypeptide is heterologous to the fungus; the pyruvate kinase polypeptide has an amino acid sequence identical to that of a pyruvate kinase polypeptide from an organism of the Saccharomyces genus; the pyruvate kinase polypeptide has at least 75% identity to SEQ ID NO:165 (S. cerevisiae PYK1); the pyruvate kinase polypeptide has at least 95% identity to SEQ ID NO:165 (S. cerevisiae PYK1); the pyruvate kinase polypeptide has at least 75% identity to SEQ ID NO:167 (S. cerevisiae PYK2); the pyruvate kinase polypeptide has at least 95% identity to SEQ ID NO:167 (S. cerevisiae PYK2); the pyruvate kinase polypeptide has an amino acid sequence identical to a pyruvate kinase polypeptide in FIG. 45; the pyruvate kinase polypeptide has at least 75% identity to a pyruvate kinase polypeptide in FIG. 45; the pyruvate kinase polypeptide has at least 95% identity to a pyruvate kinase polypeptide in FIG. 45.

[0032] In some cases, the modification to decrease pyruvate decarboxylase (PDC) activity comprises at least one modification selected from the group consisting of a modification to decrease PDC1, PDC2, PDC5, or PDC6 activity; the modification to decrease PDC polypeptide activity comprises modifications to decrease each of PDC 1, PDC5, and PDC6 activities; the modification to decrease PDC activity comprises modifications to decrease each of PDC1 and PDC5 activities; the genetic modification decreases activity by decreasing expression of a PDC polypeptide; the genetic modification that decreases expression is the deletion of all or part of a gene encoding a PDC polypeptide or the disruption of a gene encoding a PDC polypeptide; the PDC polypeptide is heterologous to the fungal cell; the PDC polypeptide has an amino acid sequence identical to that of a PDC polypeptide from an organism of the Saccharomyces genus; the PDC polypeptide has an amino acid sequence identical to that of a Saccharomyces cerevisiae PDC polypeptide; the PDC polypeptide is selected from the group consisting of: PDC 1, PDC2, PDC5 or PDC6, and combinations thereof; the PDC polypeptide has an amino acid sequence identical to that of a S. cerevisiae PDC1 polypeptide; the PDC polypeptide has at least 75% identity to SEQ ID NO:77 (S.c. PDC1); the PDC polypeptide has at least 95% identity to SEQ ID NO:77 (S.c. PDC1); the PDC polypeptide has an amino acid sequence identical to that of a S. cerevisiae PDC2 polypeptide; the PDC polypeptide has at least 75% identify to SEQ ID NO:83 (S.c. PDC2); the PDC polypeptide has at least 95% identity to SEQ ID NO:83 (S.c. PDC2); the PDC polypeptide has an amino acid sequence identical to that of a S. cerevisiae PDC5 polypeptide; the PDC polypeptide has at least 75% identity to SEQ ID NO:79 (S.c. PDC5); the PDC polypeptide has at least 95% identity to SEQ ID NO:79 (S.c. PDC5); the PDC polypeptide has an amino acid sequence identical to that of a S. cerevisiae PDC6 polypeptide; the PDC polypeptide has at least 75% identity to SEQ ID NO:81 (S.c. PDC6); the PDC polypeptide has at least 95% identity to SEQ ID NO:81 (S.c. PDC6); the PDC polypeptide has an amino acid sequence identical to a PDC polypeptide in FIG. 31; the PDC polypeptide has at least 75% identity to a PDC polypeptide in FIG. 31; the PDC polypeptide has at least 95% identity to a PDC polypeptide in FIG. 31.

[0033] In some cases, the modification to increase or decrease organic acid transport activity comprises at least one modification selected from the group consisting of a modification to increase or decrease any of S. pombe Mae1, S. cerevisiae JEN1, K. lactis JEN1, K. lactis JEN2, S. cereale ALMT1, B. napus ALMT1, M. musculus NaDC1, Streptococcus bovis malP, A. thaliana AttDT; R. norvegicus NaDC3, H. sapiens Mct1, H. sapiens Mct2 organic acid transport polypeptide activity or increase or decrease A. oryzae organic acid transporter activity. The genetic modification increases or decreases organic acid transport activity by increasing or decreasing expression of an organic acid transport polypeptide; the genetic modification that increases expression is the addition of a gene encoding an organic acid transport polypeptide; the genetic modification that increases expression is a genetic modification that increases the transcription or translation of a gene encoding an organic acid transport polypeptide; the genetic modification that decreases expression is the deletion of all or part of a gene encoding an organic acid transport polypeptide or the disruption of a gene encoding an organic acid transport polypeptide; the organic acid transport polypeptide is heterologous to the fungal cell; the organic acid transport polypeptide has an amino acid sequence identical to that of S. pombe Mae1; the organic acid transport polypeptide has at least 75% identity to SEQ ID NO:43 (S. pombe Mae 1); the organic acid transport polypeptide has at least 95% identity to SEQ ID NO:43 (S. pombe Mae1); the organic acid transport polypeptide has an amino acid sequence identical to that of K. lactis JEN1; the organic acid transport polypeptide has at least 75% identity to SEQ ID NO:25 (K. lactis JEN1); the organic acid transport polypeptide has at least 95% identity to SEQ ID NO:25 (K. lactis JEN1); the organic acid transport polypeptide has an amino acid sequence identical to that of S. cerevisiae JEN1; the organic acid transport polypeptide has at least 75% identity to SEQ ID NO:29 (S. cerevisiae JEN1); the organic acid transport polypeptide has at least 95% identity to SEQ ID NO:29 (S. cerevisiae JEN1); the organic acid transport polypeptide has an amino acid sequence identical to that of K. lactis JEN2; the organic acid transport polypeptide has at least 75% identity to SEQ ID NO:27 (K. lactis JEN2); the organic acid transport polypeptide has at least 95% identity to SEQ ID NO:27 (K. lactis JEN2); the organic acid transport polypeptide has an amino acid sequence identical to that of S. cereale ALMT1; the organic acid transport polypeptide has at least 75% identity to SEQ ID NO:47 (S. cereale ALMT1); the organic acid transport polypeptide has at least 95% identity to SEQ ID NO:47 (S. cereale ALMT1); the organic acid transport polypeptide has an amino acid sequence identical to that of B. napus ALMT1; the organic acid transport polypeptide has at least 75% identity to SEQ ID NO:45 (B. napus ALMT1); the organic acid transport polypeptide has at least 95% identity to SEQ ID NO:45 (B. napus ALMT1); the organic acid transport polypeptide has an amino acid sequence identical to that of M. musculus NaDC1; the organic acid transport polypeptide has at least 75% identity to SEQ ID NO:31 (M. musculus NaDC1); the organic acid transport polypeptide has at least 95% identity to SEQ ID NO:31 (M. musculus NaDC1); the organic acid transport polypeptide has an amino acid sequence identical to that of Streptococcus bovis malP; the organic acid transport polypeptide has at least 75% identity to SEQ ID NO:33 (Streptococcus bovis malP); the organic acid transport polypeptide has at least 95% identity to SEQ ID NO:33 (Streptococcus bovis malP); the organic acid transport polypeptide has an amino acid sequence identical to that of A. thaliana AttDT; the organic acid transport polypeptide has at least 75% identity to SEQ ID NO:35 (A. thaliana AttDT); the organic acid transport polypeptide has at least 95% identity to SEQ ID NO:35 (A. thaliana AttDT); the organic acid transport polypeptide has an amino acid sequence identical to that of R. norvegicus NaDC3; the organic acid transport polypeptide has at least 75% identity to SEQ ID NO:37 (R. norvegicus NaDC3); the organic acid transport polypeptide has at least 95% identity to SEQ ID NO:37 (R. norvegicus NaDC3); the organic acid transport polypeptide has an amino acid sequence identical to that of H. sapiens Mct1; the organic acid transport polypeptide has at least 75% identity to SEQ ID NO:39 (H. sapiens Mct1); the organic acid transport polypeptide has at least 95% identity to SEQ ID NO:39 (H. sapiens Mct1); the organic acid transport polypeptide has an amino acid sequence identical to that of H. sapiens Mct2; the organic acid transport polypeptide has at least 75% identity to SEQ ID NO:41 (H. sapiens Mct2); the organic acid transport polypeptide has at least 95% identity to SEQ ID NO:41 (H. sapiens Mct2); the organic acid transport polypeptide has an amino acid sequence identical to an organic acid transport polypeptide in FIG. 35; the organic acid transport polypeptide has at least 75% identity to an organic acid transport polypeptide in FIG. 35; the organic acid transport polypeptide has at least 95% identity to an organic acid transport polypeptide in FIG. 35; the organic acid transporter is identical to SEQ ID NO ______ (A. oryzae organic acid transporter); the organic acid transport polypeptide has at least 75% identity to SEQ ID NO ______ (A. oryzae organic, acid transporter); the organic acid transport polypeptide has at least 95% identity to SEQ ID NO ______ (A. oryzae organic acid transporter); the organic acid transporter is identical to an organic acid transporter polypeptide in FIG. 62; the organic acid transport polypeptide has at least 75% identity to an organic acid transport polypeptide in FIG. 62; the organic acid transport polypeptide has at least 95% identity to an organic acid transport polypeptide in FIG. 62.A. oryzae

[0034] In some cases, the modification to increase or decrease glucose sensing and regulatory polypeptide activity comprises at least one modification selected from the group consisting of modifications to increase or decrease SNF1, MIG1, MIG2, HXK2, RGT1, SNF3, RGT2, STD1, MTH1, GRR1, YCK1, HXK1, and GLK1 polypeptide activity; the genetic modification increases or decreases glucose sensing and regulatory polypeptide activity by increasing or decreasing expression of a glucose sensing and regulatory polypeptide; the genetic modification that increases expression is the addition of a gene encoding a glucose sensing and regulatory polypeptide; the genetic modification that increases expression is a genetic modification that increases the transcription or translation of a gene encoding a glucose sensing and regulatory polypeptide; the genetic modification that decreases expression is the deletion of all or part of a gene encoding a glucose sensing and regulatory polypeptide or the disruption of a gene encoding a glucose sensing and regulatory polypeptide; the glucose sensing and regulatory polypeptide is heterologous to the fungal cell; the glucose sensing and regulatory polypeptide has an amino acid sequence identical to that of SNF1; the glucose sensing and regulatory polypeptide has at least 75% identity to SEQ ID NO:107 (S. cerevisiae SNF1); the glucose sensing and regulatory polypeptide has at least 95% identity to SEQ ID NO:107 (S. cerevisiae SNF1); the glucose sensing and regulatory polypeptide has an amino acid sequence identical to that of MIG1; the glucose sensing and regulatory polypeptide has at least 75% identity to SEQ ID NO:109 (S. cerevisiae MIG1); the glucose sensing and regulatory polypeptide has at least 95% identity to SEQ ID NO:109 (S. cerevisiae MIG1); the glucose sensing and regulatory polypeptide has an amino acid sequence identical to that of MIG2; the glucose sensing and regulatory polypeptide has at least 75% identity to SEQ ID NO:111 (S. cerevisiae MIG2); the glucose sensing and regulatory polypeptide has at least 95% identity to SEQ ID NO:111 (S. cerevisiae MIG2); the glucose sensing and regulatory polypeptide has an amino acid sequence identical to that of HXK2; the glucose sensing and regulatory polypeptide has at least 75% identity to SEQ ID NO:113 (S. cerevisiae HXK2); the glucose sensing and regulatory polypeptide has at least 95% identity to SEQ ID NO:113 (S. cerevisiae HXK2); the glucose sensing and regulatory polypeptide has an amino acid sequence identical to that of RGT1; the glucose sensing and regulatory polypeptide has at least 75% identity to SEQ ID NO:115 (S. cerevisiae RGT1); the glucose sensing and regulatory polypeptide has at least 95% identity to SEQ ID NO:115 (S. cerevisiae RGT1); the glucose sensing and regulatory polypeptide has an amino acid sequence identical to that of SNF3; the glucose sensing and regulatory polypeptide has at least 75% identity to SEQ ID NO:117 (S. cerevisiae SNF3); the glucose sensing and regulatory polypeptide has at least 95% identity to SEQ ID NO:117 (S. cerevisiae SNF3); the glucose sensing and regulatory polypeptide has an amino acid sequence identical to that of RGT2; the glucose sensing and regulatory polypeptide has at least 75% identity to SEQ ID NO:119 (S. cerevisiae RGT2); the glucose sensing and regulatory polypeptide has at least 95% identity to SEQ ID NO:119 (S. cerevisiae RGT2); the glucose sensing and regulatory polypeptide has an amino acid sequence identical to that of STD1; the glucose sensing and regulatory polypeptide has at least 75% identity to SEQ ID NO:121 (S. cerevisiae STD1); the glucose sensing and regulatory polypeptide has at least 95% identity to SEQ ID NO:121 (S. cerevisiae STD1); the glucose sensing and regulatory polypeptide has an amino acid sequence identical to that of MTH1; the glucose sensing and regulatory polypeptide has at least 75% identity to SEQ ID NO:145 (S. cerevisiae MTH1); the glucose sensing and regulatory polypeptide has at least 95% identity to SEQ ID NO:145 (S. cerevisiae MTH1); the glucose sensing and regulatory polypeptide has an amino acid sequence identical to that of MTH1ΔTAM; the glucose sensing and regulatory polypeptide has at least 75% identity to SEQ ID NO:147 (S. cerevisiae MTH1ΔTAM); the glucose sensing and regulatory polypeptide has at least 95% identity to SEQ ID NO:147 (S. cerevisiae MTH1 Δ̅TAM); the glucose sensing and regulatory polypeptide has an amino acid sequence identical to that of GRR1; the glucose sensing and regulatory polypeptide has at least 75% identity to SEQ ID NO:123 (S. cerevisiae GRR1); the glucose sensing and regulatory polypeptide has at least 95% identity to SEQ ID NO:123 (S. cerevisiae GRR1); the glucose sensing and regulatory polypeptide has an amino acid sequence identical to that of YCK1; the glucose sensing and regulatory polypeptide has at least 75% identity to SEQ ID NO:125 (S. cerevisiae YCK1); the glucose sensing and regulatory polypeptide has at least 95% identity to SEQ ID NO:125 (S. cerevisiae YCK1); the glucose sensing and regulatory polypeptide has an amino acid sequence identical to that of HXK1; the glucose sensing and regulatory polypeptide has at least 75% identity to SEQ ID NO:127 (S. cerevisiae HXK1); the glucose sensing and regulatory polypeptide has at least 95% identity to SEQ ID NO:127 (S. cerevisiae HXK1); the glucose sensing and regulatory polypeptide has an amino acid sequence identical to that of GLK1; the glucose sensing and regulatory polypeptide has at least 75% identity to SEQ ID NO:129 (S. cerevisiae GLK1); the glucose sensing and regulatory polypeptide has at least 95% identity to SEQ ID NO:129 (S. cerevisiae GLK1); the glucose sensing and regulatory polypeptide has an amino acid sequence identical to a glucose sensing and regulatory polypeptide in any of FIGS. 50-61; the glucose sensing and regulatory polypeptide has at least 75% identity to a glucose sensing and regulatory polypeptide in FIGS. 50-61; the glucose sensing and regulatory polypeptide has at least 95% identity to a glucose sensing and regulatory polypeptide in FIGS. 50-61.

[0035] In some cases, the modification to increase hexose transporter (HXT) activity comprises at least one modification selected from the group consisting of modifications to increase or decrease HXT1, HXT2, HXT3, HXT3, HXT4, HXT5, HXT6; or HXT7 polypeptide activity; the genetic modification increases or decreases HXT activity by increasing or decreasing expression of a HXT polypeptide; the genetic modification that increases expression is the addition of a gene encoding a HXT polypeptide; the genetic modification, that increases expression is a genetic modification that increases the transcription or translation of a gene encoding a HXT polypeptide; the genetic modification that decreases expression is the deletion of all or part of a gene encoding a HXT polypeptide or the disruption of a gene encoding HXT polypeptide; the HXT polypeptide is heterologous to the fungal cell; the HXT polypeptide has an amino acid sequence identical to that of S. cerevisiae HXT1; the HXT-polypeptide has at least 75% identity to SEQ ID NO:131 (S. cerevisiae HXT1); the HXT polypeptide has at least 93% identity to SEQ ID NO:131 (S. cerevisiae HXT1); the HXT polypeptide has an amino acid sequence identical to that of S. cerevisiae HXT2; the HXT polypeptide has at least 75% identity to SEQ ID NO:133 (S. cerevisiae HXT2); the HXT polypeptide has at least 95% identity to SEQ ID NO:133 (S. cerevisiae HXT2); the HXT polypeptide has an amino acid sequence identical to that of S. cerevisiae HXT3; the HXT polypeptide has at least 75% identity to SEQ ID NO:135 (S. cerevisiae HXT3); the HXT polypeptide has at least 95% identity to SEQ ID NO:135 (S. cerevisiae HXT3); the HXT polypeptide has an amino acid sequence identical to that of S. cerevisiae HXT4; the HXT polypeptide has at least 75% identity to SEQ ID NO:137 (S. cerevisiae HXT4); the HXT polypeptide has at least 95% identity to SEQ ID NO:37 (S. cerevisiae HXT4); the HXT polypeptide has an amino acid sequence identical to that of S. cerevisiae HXT5; the HXT polypeptide has at least 75% identity to SEQ ID NO:139 (S. cerevisiae HXT5); the HXT polypeptide has at least 95% identity to SEQ ID NO:139 (S. cerevisiae HXT5); the HXT polypeptide has an amino acid sequence identical to that of S. cerevisiae HXT6); HXT polypeptide has at least 75% identity to SEQ ID NO:141 (S. cerevisiae HXT6); the HXT polypeptide has at least 95% identity to SEQ ID NO:141 (S. cerevisiae HXT6); the HXT polypeptide has an amino acid sequence identical to that of S. cerevisiae HXT7; the HXT polypeptide has at least 75% identity to SEQ ID NO:143 (S. cerevisiae HXT7); the HXT polypeptide has at least 95% identity to SEQ ID NO:143 (S. cerevisiae HXT7); the HXT polypeptide has an amino acid sequence identical to a hexose transporter (HXT) polypeptide in FIG. 44; the HXT polypeptide has at least 75% identity to a hexose transporter (HXT) polypeptide in FIG. 44; the HXT polypeptide has at least 95% identity to a hexose transporter (HXT) polypeptide in FIG. 44.

[0036] In some cases, the recombinant fungal cell comprises more than one modification selected from the group consisting of modifications to: a) increase anaplerotic activity; b) decrease PDC activity; c) increase or decrease organic acid transport activity; d) increase or decrease glucose sensing and regulatory polypeptide activity; e) increase hexose transporter (HXT) activity; and f) increase or decrease C4 dicarboxylic acid biosynthetic activity.

[0037] In some cases, the more than one modification are selected from the group consisting of modifications to: a) increase anaplerotic activity; b) decrease PDC activity; c) increase organic add transport activity; d) increase glucose sensing and regulatory polypeptide activity; and e) increase C4 dicarboxylic acid biosynthetic activity.

[0038] In some cases, the modification to increases anaplerotic activity is one or more modification selected from the group of modifications to increase PYC, PPC, or PCK activity; the modification to increases C4 dicarboxylic acid biosynthetic activity is one or more modification selected from the group of modifications to increase MDH, fumarase, or fumarate reductase activity; the modification to decrease PDC activity is one or more modifications selected from the group of modifications to decrease the activity of one or more of PDC1, PDC5, or PDC6 polypeptides; and the modification to increase organic acid transport activity is one or more modification selected from the group of modifications to increase the activity of one or more of S. pombe Mae1, S. cereale ALMT1, B. napus ALMT1 polypeptides, and an A. oryzae organic acid transporter.

[0039] In some cases, the more than one modifications are selected from the group consisting of modifications to: a) increase PYC1 or PYC2 activity; b) increase MDH2 or MDH3 activity; d) decrease each of PDC 1, PDC5, and PDC6 activities; d) increase S. pombe MAE1 (malic acid transporter) activity; e) increase A. oryzae organic acid transporter activity; and f) increase or decrease MTH1 activity.

[0040] In some cases the modifications include modification to increase PDC 1 activity and/or increase PDC6 activity and decrease pdc5 activity. Thus, a desirable strain can lack an active pdc1 gene and harbor one or both of a heterologous PDC6 gene and PDC5 genes.

[0041] In some cases, the more than one modifications are selected from the group consisting of modifications to: a) increase PYC1 or PYC2 activity; b) increase MDH2 or MDH3 activity; e) decrease each of PDC 1 and PDC 5 activities; d) increase S. pombe. MAE1 (malic acid transporter) activity; e) increase an A. oryzae organic acid transporter, and f) increase or decrease MTH1 activity.

[0042] In some cases, the more than one modifications are selected from the group consisting of modifications to: a) increase PYC1 or PYC2 activity; b) increase MDH2 or MDH3 activity; c) decrease each of PDC1, PDC5, and PDC6 activities; d) increase fumarase activity; and e) increase or decrease MTH1 activity.

[0043] In some cases, the more than one modifications are selected from the group consisting of modifications to: a) increase PYC1 or PYC2 activity; b) increase MDH2 or MDH3 activity; c) decrease each of PDC1 and PDC5 activities; d) increase fumarase activity; and e) increase or decrease MTH1 activity.

[0044] In some cases, the more than one modifications are selected from the group consisting of modifications to: a) increase PYC1 or PYC2 activity; b) increase MDH2 or MDH3 activity; c) decrease each of PDC 1, PDC5, and PDC6 activities; d) increase fumarase activity; e) increase fumarate reductase activity; and f) increase or decrease MTH1 activity.

[0045] In some cases, the more than one modifications are selected from the group consisting of modifications to: a) increase PYC1 or PYC2 activity; b) increase MDH2 or MDH3 activity; c) decrease each of PDC1 and PDC5 activities; d) increase fumarase activity; e) increase fumarate reductase activity; and f) increase or decrease MTH1 activity.

[0046] In some cases, the modification to increase fumarase activity is comprised of a modification to increase FUM1 polypeptide activity; and the modification to increase fumarate reductase activity is selected from the group consisting of modifications to increase OSM1 or FRDS1 polypeptide activity.

[0047] In various cases, the fungal cell comprises more than two modifications selected from the group consisting of modifications to: a) increase anaplerotic activity; b) decrease PDC activity; c) increase or decrease organic acid transport activity; d) increase or decrease glucose sensing and regulatory polypeptide activity; e) increase HXT activity; and f) increase or decrease C4 dicarboxylic acid biosynthetic activity.

[0048] In some cases: the fungal cell is of a genus selected from the group consisting of Saccharomyces, Zygosaccharomyces, Yarrowia, Kluyveromyces, Aspergillus, or Pichia spp; the fungal cell is Saccharomyces cerevisiae; the Saccharomyces cerevisiae is TAM, Lp4f, m850, RWB837, or derivatives thereof; the fungal cell is Saccharomyces bayanus, Saccharomyces cerevisiae var bayanus, or Saccharomyces boulardii; the fungal cell is Kluyveromyces lactis; the fungal cell is Aspergillus niger; the fungal cell is Yarrowia lipolytica.

[0049] Also disclosed is a method of producing a C4-dicarboxylic acid, comprising: culturing a recombinant fungal cell described herein under conditions that achieve. C4-dicarboxylic acid production.

[0050] In various cases: the method further includes isolating a produced C4-dicarboxylic acid; the C4-dicarboxylic acid is selected from the group consisting of malic acid, fumaric acid, tartaric acid, and succinic acid; the step of culturing under conditions that achieve C4-dicarboxylic acid production comprises culturing at a pH within the range of 1.5 to 7; the pH is lower than 5.0; pH is lower than 4.5; the pH is lower than 4.0; the pH is lower than 3.5; the pH is lower than 3.0; the pH is lower than 2.5; the pH is lower than 2.0; the step of culturing under conditions that achieve C4-dicarboxylic acid production comprises culturing under conditions and for a time sufficient for C4-dicarboxylic acid to accumulate to a level within the range of 10 to 200 g/L; the C4-dicarboxylic acid is selected from the group consisting of malic acid, fumaric acid, tartaric acid, and succinic acid; the C4-dicarboxylic acid accumulates to greater than 30 g/L (greater than 50 g/L; greater man 75 g/L; greater than 100 g/L; greater than 125 g/L; or greater than 150 g/L). In other cases the pH is allowed to decrease by at least 1, at least 2, at least 3 pH units during culturing. Thus, the pH can decrease below 5, below 4 or below 3 during culturing after starting at a higher pH.

[0051] In various cases: the step of culturing under conditions that achieve C4-dicarboxylic acid production, comprises culturing under conditions and for a time sufficient for C4-dicarboxylic acid to accumulate to a level within a range of about 0.3 moles of C4-dicarboxylic acid per mole of substrate to about 1.75 moles of C4-dicarboxylic acid per mole of substrate; the 4-dicarboxylic acid is selected from the group consisting of malic acid, fumaric acid, tartaric acid, and succinic acid; the C4-dicarboxylic acid accumulates to greater than about 0.3 moles of C4-dicarboxylic acid per mole of substrate; the C4-dicarboxylic acid accumulates to greater than about 0.5 moles of C4-dicarboxylic acid per mole of substrate; the C4-dicarboxylic acid accumulates to greater than about 0.75 moles of C4-dicarboxylic acid per mole of substrate; the C4-dicarboxylic acid accumulates to greater than about 1.0 moles of C4-dicarboxylic acid per mole of substrate; the C4-dicarboxylic acid accumulates to greater than about 1.25 moles of C4-dicarboxylic acid, per mole of substrate; the C4-dicarboxylic acid accumulates to greater than about 1.5 moles of C4-dicarboxylic acid per mole of substrate; the C4-dicarboxylic acid accumulates to greater than about 1.75 moles of C4-dicarboxylic acid per mole of substrate; the substrate is glucose; the step of culturing under conditions that achieve C4-dicarboxylicacid production comprises culturing in a medium comprising a carbon source; the carbon source is one or more carbon sources selected from the group consisting of glucose, glycerol, sucrose, fructose, maltose, lactose, galactose, hydrolyzed starch, corn syrup, high fructose corn syrup, and hydrolyzed lignocelluloses; the carbon source is glucose; the medium further comprises a carbon dioxide source; the carbon dioxide source comprises calcium carbonate or carbon dioxide gas; the carbon dioxide source is calcium carbonate; the carbon dioxide source is carbon dioxide gas.

[0052] Also disclosed is a method of preparing a food or feed additive containing a 4-dicarboxylic acid, the method comprising steps of: a) cultivating the recombinant fungal cell described herein under conditions that allow production of the C4-dicarboxylic acid; b) isolating the C4-dicarboxylic acid; and c) combining the isolated C4-dicarboxylic acid with one or more other food or feed additive components. In various cases: the C4-dicarboxylic acid is selected from the group consisting of malic acid, fumaric acid, tartaric acid, and succinic acid.

[0053] Also disclosed is a method of preparing a cosmetic containing a C4-dicarboxylic acid, the method comprising steps of: a) cultivating a recombinant fungal cell described herein under conditions that allow production of the C4-dicarboxylic acid; b) isolating the C4-dicarboxylic acid; and c) combining the C4-dicarboxylic acid with one or more cosmetic components. In various cases, the C4-dicarboxylic acid is selected from the group consisting of malic acid, fumaric acid, tartaric acid, and succinic acid.

[0054] Also described is a method of preparing an industrial chemical containing a C4-dicarboxylic acid, the method comprising steps of: a) cultivating the recombinant fungal cell described herein under conditions that allow production of the C4-dicarboxylic acid; b) isolating the C4-dicarboxylic acid; and c) combining the isolated C4-dicarboxylic acid with one or more industrial chemical, components. In various cases, the C4-dicarboxylic acid is selected from the group consisting of malic acid, fumaric acid, tartaric acid, and succinic acid.

[0055] Also disclosed is a method of preparing a biodegradable polymer containing a C4-dicarboxylic acid, the method comprising steps of: a) cultivating the recombinant fungal cell described here under conditions that allow production of the C4-dicarboxylic acid; b) isolating the C4-dicarboxylic acid; and c) combining the isolated C4-dicarboxylic acid, with one or more biodegradable polymer components. In various cases, the C4-dicarboxylic acid is selected from the group consisting of malic acid, fumaric acid, tartaric acid, and succinic acid.

[0056] Also disclosed is a method of preparing a C4-dicarboxylic acid derivative, the method comprising steps of a) cultivating the recombinant fungal cell described herein under conditions that allow production of a C4-dicarboxylic acid; h) isolating the C4-dicarboxylic acid; and c) converting the isolated C4-dicarboxylic acid into a C4-dicarboxylic acid derivative. In various cases: the C4-dicarboxylic acid is chosen from one or more of malic acid, fumaric acid, tartaric acid, and succinic acid; the C-4 dicarboxylic acid derivative is chosen from one or more of: tetrahydrofuran (THF), butane diol (e.g. 1,4-butanediol), γ-butyrolactone, pyrrolidinones (e.g. N-methyl-2-Pyrrolidone), esters, diamines, 4,4-Bionelle, hydroxybutyric acid, dibasic ester (DBE), succindiamide, 1,4-diaminobutane, succinonitrile, maleic anhydride, a hydroxybutyrolactone derivative, a hydroxysuccinate derivative and an unsaturated succinate derivative; the converting comprises one or more of physical treatments, fermentation, biocatalysis, and chemical transformation; the converting comprises one or more physical treatments; the converting comprises fermentation; the converting comprises one or more chemical transformations; the convening comprises one or more biocatalysis.

[0057] The fermentation methods can include liquid fermentation and solid state fermentation (Krishna 2005 Crit Rev Biotechnol 25:1)

### BRIEF DESCRIPTION OF THE DRAWINGS

[0058] FIG. 1 shows, glucose and pyruvate concentrations as a function of culture time as described in Example 1.

[0059] FIG. 2 shows malate, glycerol, and succinate concentrations as a function of culture time as described in Example 1.

[0060] FIG. 3 is a map of plasmid p426GPDMDH3, as described in Example 1.

[0061] FIG. 4 is a map of plasmid pRS2, as described in Example 1.

[0062] FIG. 5 is a map of plasmid pRS2ΔMDH3, as described in Example 1.

[0063] FIG. 6 is a map of plasmid YEplac112 SpMAE1, as described in Example 1.

[0064] FIG. 7 shows the biomass, the consumption of glucose, and the production of pyruvate in Batch A, Example 2.

[0065] FIG. 8 shows the production of malate, glycerol, and succinate in Batch A, Example 2.

[0066] FIG. 9 shows the biomass, the consumption of glucose, and the production of pyruvate in Batch B, Example 2.

[0067] FIG. 10 shows the production of malate, glycerol, and succinate in Batch B, Example.

[0068] FIG. 11 shows the biomass, the consumption of glucose, and the production of pyruvate in Batch C, Example 2.

[0069] FIG. 12 shows the production of malate, glycerol, and succinate in Batch C, Example 2.

[0070] FIG. 13 is a table with enzyme activities in yeast strains expressing E. coli ppc.

[0071] FIG. 14 is a table with enzyme activities in yeast strains overexpressing MDH2 and E. coli ppc.

[0072] FIG. 15 is a table with various metabolite levels of yeast strains expressing E. coli ppc and grown in shake flasks with 2% or 10% glucose as carbon source.

[0073] FIG. 16 is a table with various metabolite levels of yeast strains overexpressing MDH2 and E. coli ppc and grown in shake flasks with 2% or 10% glucose as carbon source.

[0074] FIG. 17 is a table with intracellular malate concentrations of yeast strains overexpressing MDH2 and E. coli ppc when grown on mineral medium with 2% glucose.

[0075] FIG. 18 is a table of malate dehydrogenase activities of wild-type yeast in the presence and absence of MDH1ΔL and MDH3ΔSKL plasmids.

[0076] FIG. 19 is a table with various metabolite levels of yeast strains with one or more genetic modifications.

[0077] FIG. 20 is a table with various enzyme activities of yeast in the presence and absence of MDH1ΔL and MDH3ΔSKL plasmids.

[0078] FIG. 21 is a table with various metabolite levels of yeast strains with one or more genetic modifications.

[0079] FIG. 22 shows the effect of various inhibitors on wild-type E. coli PEP carboxylase activity.

[0080] FIG. 23 shows the effect of various inhibitors on mutant E. coli PEP carboxylase activity.

[0081] FIG. 24 is a table with various metabolite levels of yeast strains with one or more genetic modifications.

[0082] FIG. 25 shows fermentation results from PDC6/pdc6 and pdc6/pdc6 diploid strains.

[0083] FIG. 26 shows fermentation results from PDC6 and pdc6 haploid strains.

[0084] FIG. 27 shows fermentation results from strains expressing a Mdh2 (P2S) variant protein.

[0085] FIGS. 28a-f depict organic acids (malic acid, fumaric acid, succinic acid and tartaric acid) and representative pathways for the production of such organic acid.

[0086] FIGS. 29-61 are tables referenced throughout the description. Each reference and information designated by each of the Genbank Accession and GI numbers are hereby incorporated by reference in their entirety. The entries in the tables are organized for convenient reference and the order is not intended to reflect preferences for certain, nucleotide or amino acid sequences.

[0087] FIG. 29 is a table with amino acid sequences of exemplary proteins for organic acid production in fungal cells.

[0088] FIG. 30 is a table with nucleotide sequences encoding exemplary proteins for organic acid production in fungal cells.

[0089] FIG. 31 is a table of exemplary pyruvate decarboxylase polypeptides for organic acid production in fungal cells.

[0090] FIG. 32 is a table of exemplary phosphoenolpyruvate carboxylase polypeptides for organic acid production in fungal cells.

[0091] FIG. 33 is a table of exemplary pyruvate carboxylase polypeptides for organic acid production in fungal cells.

[0092] FIG. 34 is a table of exemplary malate dehydrogenase polypeptides for organic acid production in fungal cells.

[0093] FIG. 35 is a table of exemplary organic acid transporter polypeptides for organic acid production in fungal cells.

[0094] FIG. 36 is a table of exemplary phosphoenolpyruvate carboxykinase polypeptides for organic acid, production in fungal cells.

[0095] FIG. 37 is a table of exemplary malate synthase polypeptides for organic acid production in fungal cells.

[0096] FIG. 38 is a table of exemplary malic enzyme polypeptides for organic acid production in fungal cells.

[0097] FIG. 39 is a table of exemplary bicarbonate transporter polypeptides for organic acid production in fungal cells.

[0098] FIG. 40 is a table of exemplary carbonic anhydrase polypeptides for organic acid production in fungal cells.

[0099] FIG. 41a is a table of exemplary ATP citrate lyase subunit 1 polypeptides for organic acid production in fungal cells.

[0100] FIG. 41b is a table of exemplary ATP citrate lyase summit 2 polypeptides for organic acid production, in fungal cells.

[0101] FIG. 42 is a table of exemplary fumarate reductase polypeptides for organic acid production in fungal cells.

[0102] FIG. 43 is a fable of exemplary fumarase polypeptides for organic acid production in fungal cells.

[0103] FIG. 44 is a table of exemplary hexose transporter polypeptides for organic acid production in fungal cells.

[0104] FIG. 45 is a fable of exemplary pyruvate kinase polypeptides for organic acid production in fungal cells.

[0105] FIG. 46 is a table of exemplary biotin protein ligase polypeptides for organic acid production in fungal cells.

[0106] FIG. 47 is a table of exemplary succinate dehydrogenase polypeptides for organic acid production in fungal cells.

[0107] FIG. 48 is a table of exemplary vitamin H transporter polypeptides for organic acid production in fungal cells.

[0108] FIG. 49 is a table of exemplary isocitrate lyase polypeptides for organic acid production in fungal cells.

[0109] FIG. 50 is a table of exemplary glucose sensing and regulatory (Hexokinase) polypeptides for organic acid production in fungal cells.

[0110] FIG. 51 is a table of exemplary glucose sensing and regulatory (STD1) polypeptides for organic acid production in fungal cells.

[0111] FIG. 52 is a table of exemplary glucose sensing and regulatory (MIG1) polypeptides for organic acid production in fungal cells.

[0112] FIG. 53 is a table of exemplary glucose sensing and regulatory (MIG2) polypeptides for organic acid production, in fungal cells.

[0113] FIG. 54 is a table of exemplary glucose sensing and regulatory (GLK1) polypeptides for organic acid production in fungal cells.

[0114] FIG. 55 is a table of exemplary glucose sensing and regulatory (SNF1) polypeptides for organic acid production in fungal cells.

[0115] FIG. 56 is a table of exemplary glucose sensing and regulatory (SNF3) polypeptides for organic acid production in fungal cells.

[0116] FIG. 57 is a table of exemplary glucose sensing and regulatory (YCK1) polypeptides for organic acid production in fungal cells.

[0117] FIG. 58 is a table of exemplary glucose sensing and regulatory (GRR1) polypeptides for organic acid production in fungal cells.

[0118] FIG. 59 is a table of exemplary glucose sensing and regulatory (MTH1) polypeptides for organic acid production in fungal cells.

[0119] FIG. 60 is a table of exemplary glucose sensing and regulatory (RGT1) polypeptides for organic acid production in fungal cells.

[0120] FIG. 61 is a table of exemplary glucose sensing and regulatory (RGT2) polypeptides for organic acid production in fungal cells.

[0121] FIG. 62 is a table of exemplary organic acid transporters for organic acid production in fungal cells.

### DEFINITIONS

[0122] Accumulation: As used herein, “accumulation” of an organic acid above background levels refers to accumulation to detectable levels, in some cases, “accumulation” refers to accumulation above a pre-determined level (e.g., above a level achieved under otherwise identical conditions with a fungal cell that has not been modified as described herein). In other cases, “accumulation” refers to titer of an organic acid, i.e. grams per liter of one or more organic acids in the broth of a cultured fungal cell. Any available assay, including those explicitly set forth herein, may be used to detect and/or quantify organic acid accumulation.

[0123] Amplification: The term “amplification” refers to increasing the number of copies of a desired nucleic acid molecule in a cell. Typically, amplification results in an increased level of activity of polypeptide (e.g., an enzyme) encoded by the nucleic acid molecule, and/or to an increased level of activity of the encoded polypeptide in a desirable location (e.g., in the cytosol).

[0124] Anaplerotic polypeptides: “Anaplerotic polypeptides” provide activities that function in the carboxylation of the three carbon (C3) metabolic intermediates phosphoenolpyruvate and pyruvate to oxaloacetate, a C4 precursor of useful dicarboxylic acids such as malic acid, fumaric acid, succinic acid, and tartaric acid. In some cases, anaplerotic polypeptides are enzymes that catalyze particular steps in a synthesis pathway that ultimately produces oxaloacetate. In some embodiments, anaplerotic polypeptides may be polypeptides that do not themselves catalyze synthetic reactions, but that regulate expression and/or activity of other polypeptides that do so. For example, anaplerotic polypeptides include, among others, pyruvate carboxylase (PYC) polypeptides, phosphoenolpyruvate carboxylase (PPC) polypeptides, phosphoenolpyruvate carboxykinase (PCK) polypeptides, pyruvate kinase (PYK) polypeptides, biotin protein ligase (BPL) polypeptides, biotin transport protein (VHT) polypeptides, bicarbonate transport activity, and carbonic anhydrase polypeptides. Synthetic anaplerotic polypeptides include PYC, PPC, PCK, and PYK polypeptides. A modification that increases the activity of an anaplerotic polypeptide is one which increases the enzymatic, transport or other functional activity of the polypeptide or one which increases the amount of the polypeptide present in a cell or a cell compartment. Polypeptides that do not catalyze a biosynthetic reaction yet function in the carboxylation of the C3 metabolic intermediates phosphoenolpyruvate and pyruvate to oxaloacetate include: BPL, VHT, bicarbonate transport, and carbonic anhydrase polypeptides. Thus, a modification that increases or decreases the activity of one of these polypeptides may also modify the level of carboxylation of C3 metabolic intermediates. Example anaplerotic polypeptides are represented by the pyruvate carboxylase (PYC) polypeptides, phosphoenolpyruvate carboxylase (PPC) polypeptides, phosphoenolpyruvate carboxykinase (PCK) polypeptides, pyruvate kinase (PYK) polypeptides, biotin protein ligase (BPL) polypeptides, biotin transport protein (VHT) polypeptides, bicarbonate transporter polypeptides, the carbonic anhydrase polypeptides in FIG. 29; polypeptides that have at least 99%, 98%, 97%, 96%, 95%, 94%, 93%, 92%, 91%, 90%, 85%, 80%, 75% identity to pyruvate carboxylase (PYC) polypeptides, phosphoenolpyruvate carboxylase (PPC) polypeptides, phosphoenolpyruvate carboxykinase (PCK) polypeptides, pyruvate kinase (PYK) polypeptides, biotin protein ligase (BPL) polypeptides, biotin transport protein (VHT) polypeptides, bicarbonate transporter polypeptides, the carbonic anhydrase polypeptides represented in FIG. 29; polypeptides represented by the Genbank GI numbers in FIGS. 32, 33, 36, 39, 40, 45, 46, and 48; and polypeptides that have at least 99%, 98%, 97%, 96%, 95%, 94%, 93%, 92%, 91%, 90%, 85%, 80%, 75% identity to a polypeptide represented by the Genbank GI numbers in FIGS. 32, 33, 36, 39, 40, 45, 46, and 48.

[0125] ATP-citrate lyase polypeptides: “ATP-citrate lyase polypeptides” catalyze the cytosolic, reversible reaction:

citrate+CoA+ATP→acetyl˜CoA+oxaloacetate+ADP+Pᵢ, (EC 2.3.3.8)

[0126] The resulting acetyl-CoA often serves as a substrate for tatty acid synthesis or the malate synthase reaction of the glyoxylate cycle. Examples of ATP-citrate lyase polypeptides subunits 1 and 2 are represented by the Genbank GI numbers in FIGS. 41a and 41b and the ATP-citrate lyase polypeptides in FIG. 29. In some cases, an ATP-citrate lyase polypeptide has an amino acid sequence that is at least about 75%, 85%, 90%, 95% or 100% identical to that of a polypeptide identified by the Genbank GI numbers in FIG. 41a or 41b or the ATP-citrate lyase polypeptides in FIG. 29.

[0127] Bicarbonate transport (BCT) polypeptides: “Bicarbonate transport (BCT) polypeptides” facilitate the (reversible) movement of membrane impermeant HCO₃⁻ across biological membranes. Classes of BCT polypeptides include, but are not limited to, Cl⁻/HCO₃⁻ exchange, Na⁺/HCO₃⁻ co-transport, and Na⁺-dependent Cl⁻/HCO₃⁻ exchange polypeptides. BCT polypeptides are critical for the physiological processes of HCO₃⁻ metabolism and excretion, the regulation of pH, and the regulation of cell volume. Examples of bicarbonate transport (BCT) polypeptides are represented by the Genbank GI numbers in FIG. 39 and the BCT polypeptides in FIG. 29. In some cases, a bicarbonate transport (BCT) polypeptide has an amino acid sequence that is at least about 75%, 85%, 90%, 95% or 100% identical to that of a polypeptide represented by the Genbank GI numbers in FIG. 39 or a BCT polypeptide in FIG. 29.

[0128] Biotin protein ligase (BPL) polypeptides: Biotin protein ligase (BPL) polypeptides catalyze the site-specific and ATP-dependent covalent transfer of biotin to the lysine side chain of the recognition sequence of an acceptor polypeptide. Acceptor polypeptides include, hut are not limited to, pyruvate carboxylase polypeptides. In many instances there is a single BPL polypeptide activity in a given source organism. In some cases, a BPL polypeptide also catalyzes the biotinylation of heterologous polypeptides that are expressed, in a host system. Certain BPL polypeptides are multi-functional proteins. In some embodiments, such multi-functional BPL polypeptides have functional domains that are involved in transcriptional repression. To give but one example, the BirA BPL polypeptide from E. coli has a functional domain that is involved in transcriptional repression. Examples of biotin protein ligase (BPL) polypeptides are represented by the Genbank GI numbers in FIG. 46 and the BPL polypeptides in FIG. 29. In some cases, a biotin protein ligase (BPL) polypeptide has an amino acid sequence that is at least about 75%, 85%, 90%, 95% or 100% identical to that of a polypeptide represented by the Genbank GI numbers in FIG. 46 or a BPL polypeptide in FIG. 29.

[0129] C4-dicarboxylic acid biosynthetic polypeptides: “C4-dicarboxylic acid biosynthetic polypeptides” are proteins of primary metabolism, which are not “anaplerotic polypeptides”, whose expression and/or activity can be modified to promote the production of one or more C4-dicarboxylic acids, C4-dicarboxylic acid biosynthetic polypeptides include, but are not limited to ATP-citrate lyase polypeptides, fumarase polypeptides, fumarate reductase polypeptides, isocitrate lyase polypeptides, malate dehydrogenase polypeptides, malate synthase polypeptides, malic enzyme polypeptides, and/or succinate dehydrogenase polypeptides. C4-dicarboxylic acid biosynthetic polypeptides are represented by the ATP-citrate lyase polypeptides, fumarase polypeptides, fumarate reductase polypeptides, isocitrate lyase polypeptides, malate dehydrogenase polypeptides, malate synthase polypeptides, malic enzyme polypeptides, and succinate dehydrogenase polypeptides in FIG. 29; polypeptides that have at least 99%, 98%, 97%, 96%, 95%, 94%, 93%, 92%, 91%, 90%, 85%, 80%, 75% identity to the ATP-citrate lyase polypeptides, fumarase polypeptides, fumarate reductase polypeptides, isocitrate lyase polypeptides, malate dehydrogenase polypeptides, malate synthase polypeptides, malic enzyme polypeptides, and succinate dehydrogenase polypeptides in FIG. 29; polypeptides represented by the Genbank GI numbers in FIGS. 34, 37, 38, 41a, 41b, 42, 43, 47, and 49; and polypeptides that have at least 99%, 98%, 97%, 96%, 95%, 94%, 93%, 92%, 91%, 90%, 85%, 80%, 75% identity to a polypeptide represented by the Genbank GI numbers in FIGS. 34, 37, 38, 41a, 41b, 42, 43, 47, and 49.

[0130] C4-dicarboxylic acid derivatives: Succinic acid, malic acid and other four carbon (C4)-dicarboxylic acids are building blocks for numerous applications including surfactants, solvents, fibers, and biodegradable polymers (see Zeikus et al. (1999) Appl Microbiol Biotechnol 51: 545-552 which is hereby incorporated, by reference in its entirety). Hydroxybutyrolactone and hydroxysuccinate derivatives are particular derivatives of malic acid that are of considerable commercial interest. Additional commodity chemicals that can be produced from malic acid or other C4-dicarboxylic acids (e.g. fumaric acid, succinic acid, maleic acid) include adipic acid, tetrahydrofuran (THF), butane diol (e.g. 1,4-butanediol), γ-butyrolactone, maleic anhydride, pyrrolidinones (e.g. N-methyl-2Pyrrolidone), esters, linear aliphatic esters, diamines, 4,4-Bionelle, hydroxybutyric acid, dibasic ester (DBE), succindiamide, 1,4-diaminobutane, succinonitrile, and unsaturated succinate derivatives. The derivatives may be produced by any number of processes including physical treatments, fermentation, biocatalysis, chemical transformation and combinations thereof.

[0131] Carbonic anhydrase (CA) polypeptides: “Carbonic anhydrase (CA) polypeptides” are zinc metalloenzymes enzymes that catalyze the reaction CO₂+H₂O [symbol] H₂CO₃ (EC 4.2.1.1). At least three distinct classes of CA polypeptides (designated α, β and γ) exist that have no significant sequence identity. Mammalian CA polypeptides belong to the α class, together with limited representatives from Bacteria and Archaea. β class CA polypeptides includes enzymes from the chloroplasts of both monocotyledonous and dicotyledonous plants as well as enzymes from phylogenetically diverse species from the Archaea and Bacteria domains. The CA polypeptide from the methanoarchaeon Methanosarcina thermophila is a representative of γ class CA polypeptides. Distinct CA polypeptide activities have been detected extracellularly, in the cytosol, and within multiple organelles. CA polypeptides are involved in several important physiological functions, including transport of CO₂/HCO₃⁻, pH and CO₂ homeostasis, biosynthetic reactions, such as anaplerosis and gluconeogenesis, and CO₂ fixation (in plants and algae). Examples of carbonic anhydrase (CA) polypeptides are represented by the Genbank GI numbers in FIG. 40 and the CA polypeptides in FIG. 29. In some cases, a carbonic anhydrase (CA) polypeptide has an amino acid sequence that is at least about 75%, 85%, 90%, 95% or 100% identical to that of a polypeptide represented by the Genbank GI numbers in FIG. 40 or a CA polypeptide in FIG. 29.

[0132] Codon: As is known in the art, the term “codon” refers to a sequence of three nucleotides that specify a particular amino acid.

[0133] DNA ligase: The term “DMA ligase” refers to an enzyme that covalently joins two pieces of double-stranded DNA.

[0134] Electroporatian: The term “electroporation” refers to a method of introducing foreign DNA into cells that uses a brief, high voltage DC charge to permeabilize the host cells, causing them to take up extra-chromosomal DNA.

[0135] Endonuclease: The term “endonuclease” refers to an enzyme that hydrolyzes double stranded DMA at internal locations.

[0136] Expression: The term “expression” refers to the production of a gene product (i.e., RNA or protein). For example, “expression” includes transcription of a gene to produce a corresponding mRNA, and translation of such an mRNA to produce the corresponding peptide, polypeptide, or protein.

[0137] Fumarase polypeptides: “Fumarase polypeptides” are polypeptides that catalyze the reversible hydration of fumarate to malate (EC 4.2.1.2). In the mitochondrial matrix, fumarase polypeptides function in the tricarboxylic acid cycle to convert fumarate to malate. Fumarase activities often are present in the cytosol as well as the mitochondria. In S. cerevisiae, the cytosolic and mitochondrial fumarase isoenzymes are encoded by one gene, FUM1. Fumarase polypeptides are synthesized as precursors and are targeted to and processed in mitochondria prior to distribution between the cytosol and mitochondria. Deletion of the amino terminal mitochondrial-targeting sequence and signal peptide of FUM1 results in exclusive cytosolic localization. It is likely that functional FUM1 polypeptide variants that preferentially localize to the mitochondria can also be identified. Examples of fumarase polypeptides are represented by the Genbank GI numbers in FIG. 43 and the fumarase polypeptides in FIG. 29. In some cases, a fumarase polypeptide has an amino acid sequence that is at least about 75%, 85%, 90%, 95% or 100% identical to that of a polypeptide represented by the Genbank GI numbers in FIG. 43 or a fumarase polypeptide in FIG. 29.

[0138] Fumarate reductase polypeptides: “Fumarate reductase polypeptides” are a set of FAD-binding proteins that catalyze, to different extents, the interconversion of fumarate and succinate. Fumarate reductase polypeptides are generally active in anaerobic or facultative microbes that live a portion of their life cycle in a reduced oxygen environment. The S. cerevisiae fumarate reductase, similar to the flavocytochrome c from Shewanella species, is a soluble protein that binds FAD non-covalently and catalyzes the irreversible reduction of fumarate to succinate, which is required for the reoxidation of intracellular NADH under anaerobic conditions. The S. cerevisiae fumarate reductase polypeptide activities are encoded by the OSM1 (mitochondria) and FRDS1 (at least partially cytosolic) genes. A distinct class of fumarate reductases is membrane-bound, possesses covalently-linked FAD, and is more structurally related to succinate dehydrogenases; these fumarate reductase polypeptides display some extent of oxidation of succinate to fumarate. Examples of fumarate reductase polypeptides are represented by the Genbank GI numbers in FIG. 42 and the fumarate reductase polypeptides in FIG. 29. In some cases, a polypeptide has an amino acid sequence that is at least about 75%, 85%, 90%, 95% or 100% identical to that of a polypeptide represented by the Genbank GI numbers in FIG. 42 or a fumarate reductase polypeptide in FIG. 29.

[0139] Functionally linked: The phrase “functionally linked” or “operably linked” refers to a promoter or promoter region and a coding or structural sequence in such an orientation and distance that transcription of the coding or structural sequence may be directed by the promoter or promoter region.

[0140] Functionally transformed: As used herein, the term “functionally transformed” refers to a host cell that has been caused to express one or more polypeptides as described herein, such that the expressed polypeptide is functional and is active at a level higher than is observed with an otherwise identical cell (i.e., a parental cell) that has not been so transformed. In many embodiments, functional transformation involves introduction of a nucleic acid encoding the polypeptide(s) such that the polypeptide(s) is/are produced in an active form and/or appropriate location. Alternatively or additionally, in some embodiments, functional transformation involves introduction of a nucleic acid that regulates expression of such an encoding nucleic acid.

[0141] Gene: The term “gene”, as used herein, generally refers to a nucleic acid encoding a polypeptide, optionally including certain regulatory elements that may affect expression of one or more gene products (i.e., RNA or protein). A gene may be in chromosomal DNA, plasmid DNA, cDNA, synthetic DMA, or other DNA that encodes a peptide, polypeptide, protein, or RNA molecule, and may include regions flanking the coding sequence involved in the regulation of expression.

[0142] Genome: The term “genome” encompasses both the chromosomes and plasmids within a host cell. For example, encoding nucleic acids of the present invention that are introduced into host cells can be part of the genome whether they are chromosomally integrated or plasmid-localized.

[0143] Glucose sensing and regulatory (GSR) polypeptides: “Glucose sensing and regulatory (GSR) polypeptides” are polypeptides that govern the complex physiological responses required for a fungal cell to utilize glucose efficiently and to the exclusion of other available carbon sources. GSR polypeptides include, among others, SNF1, MIG1, MIG2, HXK2, RGT1, SNF3, RGT2, STD1, MTH1, GRR1, YCK1, HXK1, and GLK1 polypeptides. Three regulatory systems appear to control most aspects of the glucose sensing response. S. cerevesiae and other fungi naturally produce GSR polypeptides. For example, the S. cerevesiae SNF1/MIG1 system functions to repress (high glucose) or derepress (low glucose) expression of abroad set of genes involved in the utilization of alternative carbon sources and in gluconeogenesis. In response to glucose depletion, phosphorylation of the MIG1 transcriptional repressor by the SNF1 kinase prevents both nuclear localization of the repressor and its binding to recognition sequences. MIG2, which binds to a recognition site similar to that of MIG1, and HXK2 are additional proteins implicated in controlling the expression of this set of genes. A second regulatory system, which functions primarily to regulate expression of hexose transporter (HXT) polypeptides, impinges on the action of the RGT1 transcriptional repressor. In brief glucose sensing proteins (SNF3 and RGT2) that are homologues of glucose transporters initiate a signal that is relayed to the paralogous MTH1 and STD1 proteins, which are necessary for RGT1-mediated repression. When glucose binds sensors, the MTH1 and STD1 proteins are phosphorylated by the YCK1 kinase, and this phosphorylation targets the MTH1 and STD1 proteins for GRR1 mediated ubiquitination and degradation. Significant cross-talk is also exhibited between these first two glucose sensing systems. For example, MTH1 gene expression is controlled by the MIG1 and MIG2 repressor proteins. A third glucose sensing system, which requires proteins such as, but not limited to, the GPR1 G-protein coupled receptor and hexokinases (e.g. HXK1, HXK2, and GLK1), regulates transcriptional and other cellular responses that result from glucose-mediated activation of cAMP synthesis. Examples of glucose sensing and regulatory (GSR) polypeptides are represented by the Genbank GI numbers in FIGS. 50-61 and the SNF1, MIG1, MIG2, HXK2, RGT1, SNF3, RGT2, STD1, MTH1, GRR1, YCK1, HXK1, and GLK1 polypeptides in FIG. 29, in some cases, a glucose sensing and regulatory (GSR) polypeptide has an amino acid sequence that is at least about 75%, 85%, 90%, 95% or 100% identical to mat of a polypeptide represented by the Genbank GI numbers in FIGS. 50-61 or a SNF1, MIG1, MIG2, HXK2, RGT1, SNF3, RGT2, STD1, MTH1, GRR1, YCK1, HXK1, or GLK1 polypeptide in FIG. 29.

[0144] Heterologous: The term “heterologous”, means from a source organism other than the host cell. For example, “heterologous” as used herein refers to genetic material or polypeptide that does not naturally occur in the species in which it is present and/or being expressed. It will be understood that, in general, when heterologous genetic material or polypeptide is selected for introduction into and/or expression by a host cell, the particular source organism from which the heterologous genetic material or polypeptide may be selected is not critical to the practice of the present invention. Relevant considerations may include, for example, how closely related the potential source and host organisms are in evolution, or how related the source organism is with other source organisms from which sequences of other relevant polypeptides have been selected. Where a plurality of different heterologous polypeptides and/or nucleic acids are to be introduced into and/or expressed by a host cell, different polypeptides or nucleic acids may be from different source organisms, ox from the same source organism. To give but one example, in some cases, individual polypeptides may represent individual sub-units of a complex protein activity and/or may be required to work in concert with, other polypeptides in order to achieve the goals of the present invention. In some embodiments, it will often be desirable for such polypeptides to be from the same source organism, and/or to be sufficiently related, to function appropriately when expressed together in a host cell. In some embodiments, such polypeptides may be from different, even unrelated source organisms. It will further be understood that, where a heterologous polypeptide is to be expressed in a host cell, it will often be desirable to utilize nucleic, acids whose sequences encode the polypeptide that have been adjusted to accommodate codon preferences of the host cell and/or to link the encoding sequences with regulatory elements active in the host cell.

[0145] Hexose transporter (HXT) polypeptides: “Hexose transporter (HXT) polypeptides” are proteins that belong to the major facilitator superfamily (MFS) of transporters. HXT polypeptides transport their substrates by passive, energy-independent facilitated diffusion, with glucose moving down a concentration gradient. Many prokaryotic and eukaryotic, including mammalian, sugar transporters are of the MFS superfamily. The genome of the yeast S. cerevisiae encodes at least 20 candidate HXT polypeptides, while seven (encoded by the HXT1 through HXT7 genes) have been demonstrated to encode functional glucose transporters. Expression of any one of these HXT polypeptides in a parent strain otherwise lacking the HXT1 through HXT7 genes is sufficient to facilitate growth on a medium with glucose as the sole carbon source. HXT2, HXT6, and HXT7 polypeptides are believed to be high-affinity glucose transporters, whereas HXT3 and HXT4 polypeptides are low-affinity glucose transporters. Examples of hexose transporter (HXT) polypeptides are represented by the Genbank GI numbers in FIG. 44 and the hexose transporter polypeptides in FIG. 29. In some cases, a hexose transporter (HXT) polypeptides has an amino acid sequence that is at least about 75%, 85%, 90%, 95% or 100% identical to that of a polypeptide represented by the Genbank GI numbers in FIG. 44 or a hexose transporter polypeptide in FIG. 29.

[0146] Homologous: The teen “homologous”, as used herein, means from the same source organism as the host cell. For example, as used here to refer to genetic material or to polypeptides, the term “homologous” refers to genetic material or polypeptides that naturally occurs in the organism in which it is present and/or being expressed, although optionally at different activity levels and/or in different amounts.

[0147] Host cell: As used herein, the “host cell” is a cell that is manipulated according to the present invention to increase production of one or more organic acids as described herein. A “modified host cell”, as used herein, is any host cell which has been modified, engineered, or manipulated in accordance with the present invention as compared with a parental cell. In some embodiments, the parental cell is a naturally occurring parental cell. Typically, the host cell is a microbial cell such as a fungal cell or a yeast cell.

[0148] Hybridization: “Hybridization” refers to the ability of a strand of nucleic acid to join with a complementary strand via base pairing. Hybridization occurs when complementary sequences in the two nucleic acid strands bind to one another.

[0149] Isocitrate lyase polypeptides: “Isocitrate lyase polypeptides” are polypeptides that catalyze the formation of succinate and glyoxylate from isocitrate (EC 4.1.3.1), a key reaction of the glyoxylate cycle. Examples of isocitrate lyase polypeptides are represented by the Genbank GI numbers in FIG. 49 and the isocitrate lyase polypeptides in FIG. 29. In some cases, an isocitrate lyase polypeptide has an amino acid sequence that is at least about 75%, 85%, 90%, 95% or 100% identical to that of a polypeptide represented by the Genbank GI numbers in FIG. 49 or an isocitrate lyase polypeptide in FIG. 29.

[0150] Isolated: The term “isolated”, as used herein, means that the isolated entity has been separated from at least one component with which it was previously associated. When most other components have been removed, the isolated entity is “purified” or “concentrated”. Isolation and/or purification, and/or concentration may be performed using any techniques known in the art including, for example, fractionation, extraction, precipitation, or other separation.

[0151] Malate dehydrogenase polypeptide: A malate dehydrogenase (MDH) polypeptide is any enzyme capable of catalyzing the introconversion of oxaloacetate to malate (using NAD(P)+) and vice versa (EC 1.1.1.37). Malate dehydrogenase polypeptides can be localized to the mitochondria or to the cytosol. In some embodiments, the MDH is active in the cytosol. In some embodiments, the MDH polypeptide retains activity in the presence of glucose. In some embodiments, activity of the MDH polypeptide in the presence of glucose is at least 20%, 30%, 40%, 50%, 60%, 70%, 80%, 90%, 95%, 96%, 97%, 98%, 99%, 99%, or 100% of that observed under otherwise identical activity in the absence of glucose. Such an MDH polypeptide is considered “not inactivated” in the presence of glucose. Examples of MDH polypeptides are represented by the Genbank GI numbers in FIG. 34 and the malate dehydrogenase polypeptides in FIG. 29. In some cases, a MDH polypeptide has an amino acid sequence mat is at least about 75%, 85%, 90%, 95% or 100% identical to that of a polypeptide represented by the Genbank GI numbers in FIG. 34 or a malate dehydrogenase polypeptide in FIG. 29. In one embodiment, an MDH polypeptide for use in accordance with, the present invention contains a signaling sequence or sequences capable of targeting the MDH polypeptide to the cytosol of the yeast, or the MDH polypeptide lacks a signaling sequence or sequences capable of targeting the MDH polypeptide to an intracellular region of the yeast other than the cytosol. In one embodiment, the MDH polypeptide can be S. cerevisiae MDH3ΔSKL, in which the coding region encoding the MDH has been altered to delete the carboxy-terminal SKL, residues of wild type S. cerevisiae MDH3, which normally target the MDH3 to the peroxisome.

[0152] Malate synthase polypeptides: “Malate synthase polypeptides” are enzymes of the glyoxylate cycle that catalyze the irreversible condensation of acetyl-CoA and glyoxylate to yield, malate and CoA (EC 2.3.3.9). Malate synthase polypeptide activities, like those of isocitrate lyase polypeptides, are typically elevated when a non-fermentable carbon source is provided. Examples of malate synthase polypeptides are represented by the Genbank GI numbers in FIG. 37 and the malate synthase polypeptides in FIG. 29. In some cases, a malate synthase polypeptide has an amino acid sequence that is at least about 75%, 85%, 90%, 95% or 100% identical to that of a polypeptide represented by the Genbank GI numbers in FIG. 37 or a malate synthase polypeptide in FIG. 29.

[0153] Malic enzyme polypeptides: “Malic enzyme polypeptides” are polypeptides that catalyze the reversible NAD-dependent or NADP-dependent (EC 1.1.1.40) oxidative decarboxylation of (EC 1.1.1.38 or 1.1.1.39) malate to carbon dioxide and pyruvate, with the concomitant reduction of NAD(P). The enzyme is found in most living organisms, because the products of the reaction are used as a source of carbon and reductive power in different cell, compartments. Most fungi encode a NADP-dependent malic enzyme. In S. cerevisiae, the malic enzyme polypeptide is encoded by the MAE1 gene. Examples of malic enzyme polypeptides are represented by the Genbank GI numbers in FIG. 38 and the malic enzyme polypeptides in FIG. 29, in some cases, a malic enzyme polypeptide has an amino acid sequence that is at least about 75%, 85%, 90%, 95% or 100% identical to that of a polypeptide represented by the Genbank GI numbers in FIG. 38 or a malic enzyme polypeptide in FIG. 29.

[0154] Medium: As is known in the art, the term “medium” refers to a chemical environment in which a host cell, such as a microbial cell (e.g., a yeast or fungal cell) is cultivated. Typically, a medium contains components required for the growth of the cell, and one or more precursors for the production of a dicarboxylic acid. Components for growth of host cells and precursors for the production of a dicarboxylic acid, may or may be not identical.

[0155] Modified: The term “modified”, as used herein, refers to a host cell that has been modified to increase production of one or more organic acids, as compared with an otherwise identical host organism that has not been so modified. In principle, such “modification” in accordance with the present invention may comprise any chemical, physiological, genetic, or other modification that appropriately alters production of an organic acid in a host organism as compared with such production in an otherwise identical cell not subject to the same modification. In most embodiments, however, the modification will comprise a genetic modification. For example, a genetic modification can entail: the addition of all or a portion of gene that is not naturally present in the host cell, the addition of all or a portion of a gene that is already present in the host cell, the deletion of all or a portion of a gene that is naturally in the host cell, an alteration (e.g., a sequence change in) a gene that is naturally present in the host cell (e.g., a sequence change that increases expression, a sequence change that decreases expression, a sequence change that increases enzymatic, transport or other activity of a polypeptide, a sequence change that decreases enzymatic, transport or other activity of a polypeptide) and combinations thereof. In some cases, a modification comprises at least one chemical, physiological, genetic, or other modification; in other cases, a modification comprises more than one chemical, physiological, genetic, or other modification. In certain aspects where more than one modification is utilized, such modifications can comprise any combination of chemical, physiological, genetic, or other modification (e.g., one or more genetic, chemical and/or physiological modification(s)).

[0156] Open reading frame: As is known in the art, the term “open reading frame (ORF)” refers to a region of DNA or RNA encoding a peptide, polypeptide, or protein.

[0157] Organic acid compound: As used herein, the term “organic acid compound” can refer to any of a variety of organic acids. In certain embodiments, the term refers to C4 dicarboxylic acid compounds. Representative organic acids include, for example, fumaric acid, malic acid, succinic acid, tartaric acid, and combinations thereof.

[0158] Organic acid transporter (OAT) polypeptides: “Organic acid transporter (OAT) polypeptides”, which include hut are not limited to malic acid transporter (MAE) polypeptides, are proteins whose expression and/or activities can be modified to catalyze the net efflux of one or more dicarboxylic acids from fungal cells. OAT polypeptides are a diverse set of proteins that catalyze carboxylic acid transport via several distinct mechanisms. The activity of a particular OAT polypeptide may be either increased or reduced, depending on the substrate(s) for a given OAT polypeptide and the desired dicarboxylic acid product. Furthermore, it may be possible to modify the subcellular localization of an OAT polypeptide to promote the efflux of a specific dicarboxylic acid product. As an example, a vacuolar or tonoplast dicarboxylate transporter may be targeted to the cytoplasmic membrane in order to facilitate the efflux of a dicarboxylic acid product such as malic acid. Representative OAT polypeptides include the S. pombe malate transporter MAF1, aluminum activated malate transporters (e.g. ALMT1), plant tonoplast dicarboxylate transporters (e.g. A. thaliana AttDT), mammalian sodium/dicarboxylate co-transporters, mono- and dicarboxylic acid transporters related to the K. lactis JEN1 and JEN2 proteins, respectively; and proteins related to the E. coli DcuC succinate efflux polypeptide. Examples of OAT polypeptides are represented by the Genbank; GI numbers in FIG. 35 and the OAT polypeptides in FIG. 29. In some cases, an OAT polypeptide has an amino acid sequence that is at least about 75%, 85%, 90%, 95% or 100% identical to that of a polypeptide represented by the Genbank GI numbers in FIG. 35 or FIG. 62 or an OAT polypeptide in FIG. 29 or an A. oryzae transporter A. oryzae

[0159] A “malic acid transporter protein (MAE) polypeptide” can be any protein capable of transporting malate from the cytosol of a yeast across the cell membrane and into extracellular space. A protein need not be identified in the literature as a malic acid transporter protein at the time of filing of the present application to be within the definition of an MAE.

[0160] An MAE from any source organism may be used and the MAE may be wild type or modified from wild type. The MAE can be Schizosaccharomyces pombe SpMAE1. In one embodiment, the MAE has at least 75% identity to the amino acid sequence given in SEQ ID NO:3. In one embodiment, the MAE has at least 80% identity to the amino acid sequence given in SEQ ID NO:3. In one embodiment, the MAE has at least 85% identity to the amino acid sequence given in SEQ ID NO:3. In one embodiment, the MAE has at least 90% identity to the amino acid sequence given in SEQ ID NO:3. In one embodiment, the MAE has at least 95% identity to the amino acid sequence given in SEQ ID NO:3. In another embodiment, the MAE has at least 96% identity to the amino acid sequence given in SEQ ID NO: 3. In an additional embodiment, the MAE has at least 97% identity to the amino acid sequence given in SEQ ID NO:3. In yet another embodiment, the MAE has at least 98% identity to the amino acid sequence given in SEQ 10 NO:3. In still another embodiment, the MAE has at least 99% identity to the amino acid sequence given in SEQ ID NO: 3. In still yet another embodiment, the MAE has the amino acid sequence given in SEQ ID NO:3. A. oryzae

[0161] Another useful transporter is the A. oryzae transporter. Useful transporters can have an amino acid sequence that is at least 80%, 85%, 87%, 89%, 90%, 93%, 95%, 98% or 99% identical to the A. oryzae transporter or SEQ ID NO:______ or is identical to the amino acid sequence of SEQ ID NO:______.

[0162] PDC-reduced: As used herein, the term “PDC-reduced” refers to a yeast cell containing a modification (e.g., a genetic modification that deletes all or a portion of a PDC gene or a genetic modification that alters the activity or expression of PDC) that reduces pyruvate decarboxylase activity as compared with an otherwise identical yeast that is not modified. In some embodiments, a PDC-reduced yeast cell has reduced activity of one or more pyruvate decarboxylase polypeptides relative to the unmodified yeast cell (e.g., an otherwise identical yeast cell lacking the modification). In certain cases thereof the pyruvate decarboxylase polypeptide is chosen from one or more of Pdc1, Pdc2, Pdc5, Pdc6 polypeptides including any of the pyruvate decarboxylase and Pdc2 polypeptides in FIG. 31. In some cases, a PDC-reduced cell has reduced or substantially eliminated Pdc1 polypeptide activity. In certain cases, the PDC-reduced cell further comprises reduced or substantially eliminated Pdc2, Pdc5, and/or Pdc6 polypeptide activity. In some cases, a PDC-reduced cell has reduced or substantially eliminated Pdc2 polypeptide activity. In certain embodiments thereof, the PDC-reduced cell further comprises reduced or substantially eliminated Pdc1, Pdc5, and/or Pdc6 polypeptide activity. In some cases, a PDC-reduced cell has reduced or substantially eliminated Pdc5 polypeptide activity, in certain cases thereof, the PDC-reduced cell further comprises reduced and/or substantially eliminated Pdc1, Pdc2, and/or Pdc6 polypeptide activity. In some cases a PDC-reduced cell has reduced or substantially eliminated Pdc6 polypeptide activity. In certain cases, the PDC-reduced cell further comprises reduced and/or substantially eliminated Pdc1, Pdc2, and/or Pdc5 polypeptide activity. In some cases a PDC-reduced cell has reduced and/or substantially eliminated Pdc1 and Pdc5 polypeptide activity. In some cases, a PDC-reduced cell has reduced and/or substantially eliminated Pdc1 and Pdc6 polypeptide activity. In some cases, a PDC-reduced cell has reduced and/or substantially eliminated Pdc5 and Pdc6 polypeptide activity. In some cases, a PDC-reduced cell has reduced and/or substantially eliminated Pdc1, Pdc5 and Pdc6 polypeptide activity. In some embodiments, a PDC-reduced cell has 3-fold, 5-fold, 10-fold, 50-fold less pyruvate decarboxylase activity as compared with an otherwise identical parental cell not containing the modification. In some cases, a PDC-reduced cell has pyruvate decarboxylase activity below at least about 0.075 micromol/min mg protein⁻¹, at least about 0.045 micromol/min mg protein⁻¹, at least about 0.025 micromol-min mg protein⁻¹; in some embodiments, a PDC-reduced cell has pyruvate decarboxylase activity below about 0.005 micromol/min mg protein⁻¹ when using the methods described by van Maris et al. (Overproduction of Threonine Aldolase Circumvents the Biosynthetic Role of Pyruvate Decarboxylase in Glucose-grown Saccharomyces cerevisiae. Appl. Environ. Microbiol. 69:2094-2099, 2003). In some cases, a PDC-reduced cell has no detectable pyruvate decarboxylase activity. In some cases, a cell with no detectable pyruvate decarboxylase activity is referred to as “PDC-negative”. In some cases, a PDC-negative cell lacks Pdc1, Pdc5 and Pdc6 polypeptide activity. In some cases, a PDC-negative cell has pyruvate decarboxylase activity below about 0.005 micromol/min mg protein⁻¹.

[0163] Phosphoenolpyruvate carboxykinase (PCK) polypeptide: A “phosphoenolpyruvate carboxykinase (PCK) polypeptide” is a polypeptide that catalyzes the reversible formation of oxaloacetate and ATP from phosphoenolpyruvate, ADP, and carbon dioxide (EC 4.1.1.49). Under physiological conditions such as glucose limitation, PCK acts to catalyze the formation of phosphoenolpyruvate from OAA (for gluconeogenesis), thereby reversing the anaplerotic flux provided by PYC and PPC. Examples of PCK polypeptides are represented by the Genbank GI numbers in FIG. 36 and the PCK polypeptides in FIG. 29, in some cases, a PCK polypeptide has an amino acid sequence that is at least about 75%, 85%, 90%, 95% or 100% identical to that of a polypeptide represented by the Genbank GI numbers in FIG. 36 or a PCK polypeptide in FIG. 29.

[0164] Phosphoenolpyruvate carboxylase (PPC) polypeptide: A “phosphoenolpyruvate carboxylase (PPC) polypeptide” is a polypeptide catalyzes the addition of carbon dioxide to phosphoenolpyruvate (PEP) to form oxaloacetic (EC 4.1.1.31). E. coli PPC has been observed to be negatively regulated by downstream products including by malate. In some embodiments, the PPC polypeptide is modified to be less sensitive to inhibition by one or more of malate, aspartate, and/or oxaloacetate. Examples of PPC polypeptides are represented by the Genbank GI numbers in FIG. 32 and the PPC polypeptides in FIG. 29. In some cases, a PPC polypeptide has an amino acid sequence that is at least about 75%, 85%, 90%, 95% or 100% identical to that of a polypeptide represented by the Genbank GI numbers in FIG. 32 or a PPC polypeptide in FIG. 29.

[0165] Plasmid: As is known in the art, the term “plasmid” refers to a circular or linear, extra-chromosomal, replicatable piece of DNA.

[0166] Polymerase chain reaction: As is known in the art, the term “polymerase chain reaction (PGR)” refers to an enzymatic technique to create multiple copies of one sequence of nucleic acid. Copies of DNA sequence are prepared, by shuttling a DNA polymerase between two amplimers. The oasis of this amplification method is multiple cycles of temperature changes to denature, then re-anneal amplimers, followed by extension to synthesize new DNA strands in the region located between the flanking amplimers.

[0167] Polypeptide: The term “polypeptide”, as used herein, generally has its art-recognized meaning of a polymer of at least three amino acids. However, the term is also used to refer to specific functional classes of polypeptides, such as, for example, anaplerotic polypeptides (e.g. pyruvate carboxylase (PYC) polypeptides, phosphoenolpyruvate carboxylase (PPC) polypeptides, phosphoenolpyruvate carboxykinase (PCK) polypeptides, pyruvate kinase (PYK) polypeptides, biotin protein ligase activity (BPL) polypeptides, biotin transport protein (VHT) polypeptides, bicarbonate transport polypeptides, and carbonic anhydrase polypeptides), C4-dicarboxylic acid biosynthetic polypeptides (e.g., ATP-citrate lyase polypeptides, fumarase polypeptides, fumarate reductase polypeptides, isocitrate lyase polypeptides, malate synthase polypeptides, malate dehydrogenase, malic enzyme polypeptides, and/or succinate dehydrogenase polypeptides), GSR polypeptides (e.g. SNF1, MIG1, MIG2, HXK2, RGT1, SNF3, RGT2, STD1, MTH1, GRR1, YCK1, HXK1, and GLK1), hexose transporter polypeptides (e.g. HXT1, HXT2, HXT3, HXT4, HXT5, HXT6, and HXT7), organic acid transporter (OAT) polypeptides (e.g. S. pombe malate transporter MAE1, aluminum activated malate transporters (e.g. ALMT1), plant tonoplast dicarboxylate transporters (e.g. A. thaliana AttDT), mammalian sodium/dicarboxylate co-transporters, mono- and dicarboxylic acid transporters related to the K. lactis JEN1 and JEN2 proteins, A. oryzae transporter polypeptides respectively; and proteins related to the E. coli DcuC succinate efflux polypeptide), and pyruvate decarboxylase (PDC) polypeptides. For each such class, the present specification provides several examples of known sequences of such polypeptides. Those of ordinary skill in the art will appreciate, however, that the term “polypeptide” is intended to be sufficiently general as to encompass not only polypeptides having the complete sequence recited herein (or in a reference or database specifically mentioned herein), but also to encompass polypeptides that represent functional fragments (i.e., fragments retaining at least one activity) of such complete polypeptides. Moreover, those of ordinary skill in the art understand that protein sequences generally tolerate some substitution without destroying activity. Thus, any polypeptide that retains activity and shares at least about 30-40% overall sequence identity, often greater than about 50%, 60%, 70%, or 80%, and further usually including at least one region of much higher identity, often greater than 90% or even 95%, 96%, 97%, 98%, or 99% in one or more highly conserved regions, usually encompassing at least 3-4 and often up to 20 or more amino acids, with another polypeptide of the same class, is encompassed within the relevant term “polypeptide” as used herein. Other regions of similarity and/or identity can be determined by those of ordinary skill in the art by analysis of the sequences of various polypeptides presented in FIG. 29 and FIGS. 31-61 herein. In some cases a polypeptide has an amino acid sequence that differs from the amino acid sequence of a polypeptide presented in the FIG. 29 and FIGS. 31-61 herein by fewer than 20, 15, 10 or 5 amino acids. In some cases the amino acid changes are conservative changes.

[0168] Promoter: As is known in the art, the term “promoter” or “promoter region” refers to a DNA sequence, usually found upstream (5′) to a coding sequence, that controls expression of the coding sequence by controlling production of messenger RNA (mRNA) by providing the recognition site for RNA polymerase and/or other factors necessary for start of transcription at the correct site.

[0169] Pyruvate carboxylase enzyme (PYC) polypeptide: A “pyruvate carboxylase (PYC) polypeptide” can be any enzyme that uses a HCO₃⁻ substrate to catalyze an ATP-dependent conversion of pyruvate to oxaloacetate (EC 6.4.1.1). PYC polypeptides contain a covalently attached biotin prosthetic group, which serves as a carrier of activated CO₂. In most instances, the activity of PYC polypeptides depends on the presence of acetyl-CoA. Biotin is not carboxylated (on PYC) unless acetyl-CoA (or a closely related acyl-CoA) is hound to the enzyme. Aspartate often serves as an inhibitor of PYC polypeptides. PYC polypeptides are generally active in a tetrameric form. Examples of pyruvate carboxylase polypeptides are represented by the Genbank GI numbers in FIG. 33 and the pyruvate carboxylase polypeptides in FIG. 29. In some cases, a pyruvate carboxylase has an amino acid sequence that is at least about 75%, 85%, 90%, 95% or 100% identical to that of a polypeptide represented by the Genbank GI numbers in FIG. 33 or a pyruvate carboxylase polypeptide in FIG. 29.

[0170] In one embodiment, a PYC polypeptide is a PYC that has at least 75% identity to the amino acid sequence given in SEQ ID NO:1. In one embodiment, the PYC has at least 80% identity to the amino acid sequence given in SEQ ID NO:1. In one embodiment, the PYC has at least 85% identity to the amino acid sequence given in SEQ ID NO: 1. In one embodiment, the PYC has at least 90% identity to the amino acid sequence given in SEQ ID NO:1. In one embodiment, the PYC has at least 95% identity to the amino acid sequence given in SEQ ID NO:1. In another embodiment, the PYC has at least 96% identity to the amino acid sequence given in SEQ ID NO:1. In an additional embodiment, the PYC has at least 97% identity to the amino acid sequence given in SEQ ID NO:1. In yet another embodiment, the PYC has at least 98% identity to the amino acid sequence given in SEQ ID NO:1. In still another embodiment, the PYC has at least 99% identity to the amino acid sequence given in SEQ ID NO:1. In still yet another embodiment, the PYC has the amino acid sequence given in SEQ ID NO:1.

[0171] Pyruvate decarboxylase (PDC) polypeptide: A “pyruvate decarboxylase polypeptide” can be any thiamin diphosphate-dependent enzyme that catalyses the decarboxylation of pyruvic acid to acetaldehyde and carbon dioxide (EC 4.1.1.1). Examples of pyruvate decarboxylase polypeptides are represented by the Genbank GI numbers in FIG. 31 and the pyruvate decarboxylase polypeptides in FIG. 29. In some cases, a pyruvate decarboxylase has an amino add sequence that is at least about 75%, 85%, 90%, 95% or 100% identical to that of a polypeptide represented by the Genbank GI numbers in FIG. 31 or a pyruvate decarboxylase polypeptide in FIG. 29.

[0172] Pyruvate kinase: Pyruvate kinase catalyses the irreversible conversion of phosphoenolpyruvate (PEP) to pyruvate (EC 2.7.1.40), the final step in glycolysis. Many pyruvate kinase enzymes are tetrameric complexes of identical subunits. PYK polypeptides play a key role in regulating glycolytic flux. PYK polypeptides from Saccharomyces cerevisiae have an absolute requirement for both monovalent and divalent cations, undergo homotropic activation by PEP and Mn²⁺, and heterotopic activation by fructose 1,6-bisphosphate (FBP). Potassium is the physiologically important monovalent activator, but several other monovalent cations can also activate PYK polypeptides. Examples of pyruvate kinase polypeptides are represented by the Genbank GI numbers in FIG. 45 and the pyruvate kinase polypeptides in FIG. 29. In some cases, a pyruvate kinase has an amino acid sequence that is at least about 75%, 85%, 90%, 95% or 100% identical to that of a polypeptide represented by the Genbank GI numbers in FIG. 45 or a pyruvate kinase polypeptide in FIG. 29.

[0173] Recombinant: A “recombinant” host cell, as mat term is used herein, is a host cell that has been genetically modified. For example, a “recombinant cell” can be a cell that contains a nucleic acid sequence not naturally occurring in the cell, or an additional copy or copies of an endogenous nucleic acid sequence, wherein the nucleic acid sequence is introduced into the cell or an ancestor thereof by human action. A recombinant cell includes, but is not limited to: a cell which has been genetically modified by deletion of all or a portion of a gene, a cell that has had a mutation introduced into a gene, a cell that has had a nucleic acid sequence inserted either to add a functional gene or disrupt a functional gene, and a cell that has a gene that has been modified by both removing and adding a nucleic acid sequence, A “recombinant vector” or “recombinant DNA or RNA construct” refers to any nucleic acid molecule generated by the hand of man. For example, a recombinant construct may be a vector such as a plasmid, cosmid, virus, autonomously replicating sequence, phage, or linear or circular single-stranded or double-stranded DNA or RNA molecule. A recombinant nucleic acid may be derived from any source and/or capable of genomic integration or autonomous replication where it includes two or more sequences that have been linked together by the hand of man. Recombinant constructs may, for example, be capable of introducing a 5′ regulatory sequence or promoter region and a DNA sequence for a selected gene product into a cell in such a manner that the DNA sequence is transcribed into a functional mRNA, which may or may not be translated and therefore expressed.

[0174] Restriction enzyme: As is known in the art, the term “restriction enzyme” refers to an enzyme that recognizes a specific sequence of nucleotides in double stranded DMA and cleaves both strands; also called a restriction endonuclease. Cleavage typically occurs within the restriction site or close to it.

[0175] Screenable: The term “screenable” is used to refer to a marker whose expression confers a phenotype facilitating identification, optionally without facilitating survival, of cells containing the marker, in many embodiments, a screenable marker imparts a visually or otherwise distinguishing characteristic (e.g. color changes, fluorescence).

[0176] Selectable: The term “selectable” is used to refer to a marker whose expression confers a phenotype facilitating identification, and specifically facilitating survival, of cells containing the marker. Selectable markers include those, which confer resistance to toxic chemicals (e.g. ampicillin, kanamycin) or complement a nutritional deficiency (e.g. uracil, histidine, leucine).

[0177] Sequence Identity: As used, herein, the term “sequence identify” refers to a comparison between two sequences (e.g., two nucleic acid sequences or two amino acid sequences) and assessment of the degree to which they contain the same residue at the same position. As is known to those of ordinary skill in the art, an assessment of sequence identity includes an assessment of which positions in different sequences should be considered to be corresponding positions; adjustment for gaps etc. is permitted. Furthermore, an assessment of residue identity can include an assessment of degree of identity such that consideration can be given to positions in which the identical residue (e.g., nucleotide or amino acid) is not observed, but a residue sharing one or more structural, chemical, or functional features is found. Identity can be determined by a sequence alignment. The percent identity between the two sequences is a function of the number of identical positions shared by the sequences, taking into account the number of gaps, and the length of each gap, which needs to be introduced for optimal alignment of the two sequences. Any of a variety of algorithms or approaches may be utilized to calculate sequence identity. For example, in some embodiments, the Needleman and Wunsch (1970) J. Mol. Biol. 48:444-453 algorithm can be utilized. This algorithm has been, incorporated into the GAP program in the GCG software package (available at http://www.geg.com). In some such embodiments, the Neddleman and Wunsch algorithm is employed, using either a Blossom 62 matrix or a PAM250 matrix, and a gap weight of 16, 14, 12, 10, 8, 6, or 4 and a length weight of 1, 2, 3, 4, 5, or 6. In some embodiments, sequence alignment is performed using the GAP program in the GCG software package (available at http://www.geg.com), using a NWSgapdna.CMP matrix and a gap weight of 40, 50, 60, 70, or 80 and a length weight of 1, 2, 3, 4, 5, or 6. A particularly preferred set of parameters (and the one that should be used if the practitioner is uncertain about what parameters should be applied to determine if a molecule is within a sequence identity or homology limitation of the invention) are a Blossum 62 scoring matrix, with a gap penalty of 12, a gap extend penalty of 4, and a frameshift gap penalty of 5. In some embodiments, a sequence alignment is performed using the algorithm of Meyers and Miller ((1989) CABIOS, 4:11-17). This algorithm has been incorporated into the ALIGN program (version 2.0). In some such embodiments, this algorithm is employed, using a PAM120 weight residue table, a gap length penalty of 12 and a gap penalty of 4. In some embodiments, a sequence alignment is performed using the ClustalW program. In some such embodiments, default values, namely: DNA Gap Open Penalty=1.5.0, DNA Gap Extension Penalty=6.66, DNA Matrix=Identity, Protein Gap Open Penalty=10.0, Protein Gap Extension Penalty=0.2, Protein matrix=Gonnet, and employed. Identity can be calculated according to the procedure described by the ClustalW documentation: “A pairwise score is calculated for every pair of sequences that are to be aligned. These scores are presented in a table in the results. Pairwise scores are calculated as the number of identities in the best alignment divided by the number of residues compared (gap positions are excluded). Both of these scores are initially calculated as percent identity scores and are converted to distances by dividing by 100 and subtracting from 1.0 to give number of differences per site. In certain embodiments, the length of a sequence aligned for comparison purposes is at least 30%, at least 40%, at least 50%, at least 60%, at least 70%, at least 80%, at least 90%, at least 95% or 100% of the length of the reference sequence. The comparison of sequences and determination of percent identity between two sequences can be accomplished using a mathematical algorithm.

[0178] Small Molecule: In general, a small molecule is understood in the art to be an organic molecule that is less than about 5 kilodaltons (Kd) in size. In some embodiments, the small molecule is less than about 3 Kd, 2 Kd, or 1 Kd. In some embodiments, the small molecule is less than about 800 daltons (D), 600 D, 500 D, 400 D, 300 D, 200 D, or 100 D. In some embodiments, small molecules are non-polymeric. In some embodiments, small molecules are not proteins, peptides, or amino acids. In some embodiments, small molecules are not nucleic acids or nucleotides. In some embodiments, small molecules are not saccharides or polysaccharides.

[0179] Source organism: The term “source organism” as used herein, refers to the organism in which a particular polypeptide or genetic sequence can be found in nature. Thus, for example, if one or more homologous or heterologous polypeptides or genetic sequences is/are being expressed in a host organism, the organism in which the polypeptides or sequences are expressed in nature (and/or from which their genes were originally cloned) is referred to as the “source organism”. Where multiple homologous or heterologous polypeptides and/or genetic sequences are being expressed in a host organism, one or more source organism(s) may be utilized for independent selection of each of the heterologous polypeptide(s) or genetic sequences. It will be appreciated that any and all organisms that naturally contain relevant polypeptide or genetic sequences may be used as source organisms in accordance with the present invention. Representative source organisms include, for example, animal, mammalian, insect, plant, fungal, yeast, algal, bacterial archaebacterial, cyanobacterial, and protozoal source organisms. For example a source organism may be a fungus, including yeasts, of the genus Saccharomyces, Yarrowia, Aspergillus, Schizosaccharomyces, or Kluyveromyces. In certain embodiments, the source organism may be of the species Saccharomyces cerevisiae, Yarrowia lipolytica, Aspergillus niger, Aspergillus oryzae, Schizosaccharomyces pombe, or Kluyveromyces lactis. For example a source organism may be a bacterium, including an archaebacterium, of the genus Nocardia, Methanothermobacter, Actinobacillus, Escherichia, Erwinia, (Thermo)synechococcus, Streptococcus or Corynebacterium. In certain embodiments, the source organism, may be of the species Nocardia sp. JS614, Methanothermobacter thermautotrophicus str. Delta H, Actinobacillus succinogenes, Actinobacillus pleuropneumoniae, Escherichia coli, Erwinia carotovora, Erwinia chrysanthemi, (Thermo)synechococcus vulcanus, Streptococcus bovis or Corynebacterium glutamicum. For example a source organism may be a plant of the genus Arabidopsis, Brassica or Triticum. In certain embodiments, the source organism may be of the species Arabidopsis thaliana, Brassica napus or Triticum secale. For example a source organism may be a mammal of the genus Rattus, Mus or Homo. In certain embodiments, the source organism may be of the species Rattus norvegicus, Mus musculus or Homo sapiens.

[0180] Succinate dehydrogenase (SDH) polypeptides: “Succinate dehydrogenase (SDH) (complex II or succinate:ubiquinone oxidoreductase) polypeptides” are polypeptides that participate in the aerobic mitochondrial electron transport chain and tricarboxylic acid (TCA) cycle by oxidizing succinate to fumarate and transferring the electrons to ubiquinone (EC 1.3.5.1). Two electrons from succinate are transferred one at a time through a flavin cofactor and a chain of iron-sulfur clusters to reduce ubiquinone to an ubisemiquinone intermediate and to ubiquinol. In general, a complex of SDH polypeptides is composed of a catalytic heterodimer and a membrane domain, comprising two smaller hydrophobic subunits that anchor the enzyme to the mitochondrial inner membrane. Succinate dehydrogenase (SDH) of Saccharomyces cerevisiae consists of four subunits encoded by the SDH1, SDH2, SDH3, and SDH4 genes. Examples of succinate dehydrogenase polypeptides are represented by the Genbank GI numbers in FIG. 47 and the succinate dehydrogenase polypeptides in FIG. 29. In some cases, a succinate dehydrogenase polypeptide has an amino acid sequence that is at least about 75%, 85%, 90%, 95% or 100% identical, to that of a polypeptide represented by the Genbank GI numbers in FIG. 47 or a succinate dehydrogenase polypeptide in FIG. 29.

[0181] Transcription: As is known in the art, the term “transcription” refers to the process of producing an RNA copy from a DNA template.

[0182] Transformation: The term “transformation”, as used herein, typically refers to a process of introducing a nucleic acid molecule into a host cell. Transformation typically achieves a genetic modification of the cell. The introduced nucleic acid, may integrate into a chromosome of a cell, or may replicate autonomously. A cell that has undergone transformation, or a descendant of such, a cell, is “transformed” and is a “recombinant” cell. Recombinant cells are modified cells as described herein. If the nucleic acid that is introduced into the cell comprises a coding region encoding a desired protein, and the desired protein is produced in the transformed yeast and is substantially functional, such a transformed yeast is “functionally transformed.” Cells herein may be transformed with, for example, one or more of a vector, a plasmid of a linear piece (eg., a linear piece of DNA created by linearizing a vector) of DNA to become functionally transformed.

[0183] Translation: As is known in the art, the term “translation” refers to the production of protein from messenger RNA.

[0184] Yield: The term “yield”, as used herein, refers to the amount of a desired product (e.g., an organic acid) produced (molar or weight/volume) divided by the amount of carbon, source (e.g., dextrose) consumed (molar or weight/volume) multiplied by 100.

[0185] Unit: The term “unit”, when used to refer to an amount of an enzyme, refers to the enzymatic activity and indicates the amount of micromoles of substrate converted per mg of total cell proteins per minute.

[0186] Vector. The term “vector” as used herein refers to a DNA or RNA molecule (such as a plasmid, linear piece of DNA, cosmid, bacteriophage, yeast artificial chromosome, or virus, among others) that carries nucleic acid sequences into a host cell. The vector or a portion of it can be inserted into the genome of the host cell.

[0187] Vitamin H transport (VHT) polypeptides: “Vitamin H transport (VHT) polypeptides” are polypeptides that mediate biotin uptake through a carrier-mediated and energy-requiring mechanism. Many fungal species are biotin auxotrophs; VHT polypeptide activity may be essential for growth in such strains. VHT polypeptides axe members of a major facilitator superfamily. Examples of VHT polypeptides are represented by the Genbank GI numbers in FIG. 48 and the VHT polypeptides in FIG. 29. In some cases, a VHT polypeptide has an amino acid sequence that is at least about 75%, 85%, 90%, 95% or 100% identical to that of a polypeptide represented by the Genbank GI numbers in FIG. 48 or a VHT polypeptide in FIG. 29.

### DESCRIPTION OF CERTAIN ILLUSTRATIVE EMBODIMENTS

### Organic Acids

[0188] Described herein are methods that can be used to engineer host cells to produce any of a variety of organic acid compounds. In certain cases, for example, the methods are utilized to engineer host cells to produce one or more of fumaric acid, malic acid, succinic acid, and tartaric acid (see FIG. 28a-g). In certain cases the methods are utilized to engineer host cells to produce one or more derivatives of one or more of these compounds.

### Fumaric Acid

[0189] Fumaric acid (FIG. 28d) is naturally produced by a variety of organisms including, for example, fumitory (Fumaria officinalis), bolete mushrooms (specifically Boletus fomentarius var. pseudo-igniarius), lichen, and Iceland moss, and is also an intermediate (in the form of fumarate) in the citric acid cycle.

[0190] Fumaric acid is non-toxic and is widely used in the food industry, for example as a food acidulant. Fumaric acid can be used as a substitute for tartaric acid and/or citric acid (for which it is commonly substituted at the level of 0.91 g fumaric for each 1.36 g citric), and is a common component of food additives, dietary supplements and candy. Fumaric acid is a useful intermediate in the preparation of a variety of edible products including, for example, malic acid and aspartic acid.

[0191] Fumaric acid is used as an industrial chemical in the manufacture of polyester resins and polyhydric alcohols and as a mordant for dyes.

[0192] Also, fumaric acid esters are sometimes used to treat psoriasis (e.g., at a dose ranging from approximately 50-60 mg/day to over 1200 mg/day).

[0193] In general, fumaric acid can be used in the production of a wide variety of industrial chemicals as fumaric acid derivatives, including but not limited to, tetrahydrofuran (THF), butanediol (e.g. 1,4-butanediol), γ-butyrolactone, pyrrolidinones (e.g. N-methyl-2-pyrrolidone), esters, diamines, 4,4-Bionelle, hydroxybutyric acid, dibasic ester (DBE), maleic anhydride, succindiamide, 1,4-diaminobutane, succinonitrile, unsaturated succinate derivatives, polymers (including biodegradable polymers) such as polybutylene terephthalate. These derivatives may be produced by any number of processes including physical treatments, fermentation, biocatalysis, chemical transformation and combinations thereof.

### Malic Acid

[0194] Malic acid (FIG. 28a) is a tart-tasting compound that is naturally produced by many fruits and is also used in the production of a variety of foods. Beneficial traits of malic acid for the food industry include flavor enhancement relative to other products, desirable properties for blending with other ingredients, and chelating abilities to increase the solubility and availability of ions such as calcium. Malic acid is currently used in the production of a wide range of foods, including beverages, confectioneries (particularly sour-tasting candies) and bakery products, as well as food preservatives.

[0195] In beverages, malic acid improves flavors and masks the tastes of some salts and sweeteners; it also improves pH stability and provides several desirable properties to calcium fortified drinks. In candies, malic acid provides lingering sourness and exceptional blending properties, including its high solubility at relatively low temperatures. Malic acid functions to provide consistent texture and balanced flavor in bakery products. In food applications, malic acid can also be used in edible and antimicrobial films and coatings, which can also be further treated with a variety of powdered ingredients.

[0196] Malic acid is also currently utilized in the cosmetic industry, for example as part of face and/or body lotions, as well as in nail enamel compositions that are made of polymers plasticized with esters of malic acid.

[0197] Malic acid is also utilized in the chemical industry, and has significant potential for many high-volume industrial chemical applications derived from a malic acid feedstock. These applications include, for example, surfactants and biodegradable polymers. Particularly useful industrial chemical derivatives of malic acid include, but are not limited to, hydroxybutyrolactone and hydroxysuccinate derivatives, maleic anhydride, 1,4-butanediol, and polymers (including biodegradable polymers) such as polymalic acid and polybutylene terephthalate. These derivatives may be produced by any number of processes including physical treatments, fermentation, biocatalysis, chemical transformation and combinations thereof,

### Succinic Acid

[0198] Succinic acid (in the form of its anion, succinate) is naturally produced in a variety of organisms as an intermediate in the citric acid cycle (see FIGS. 28b and e-g); it is also produced by many anaerobic microbes as the major end-product of their energy metabolism. To give but a few examples, succinate is produced from sugars or amino acids by proprionate-producing bacteria such as, for example, species of Propionibacterium, by typical gastrointestinal bacteria such as Anaerobiospirillum succiniciproducens, Bacteroides sp., Escherichia coli, Pectinaturs sp., etc, and by rumen bacteria such as, for example, Actinobacillus succinogens, Bacteroides amylophilus, Cytophaga succinans, Fibrobacter succinogens, Mannheimia succiniciproducens, Prevotella ruminicola, Ruminococcus flavefaciens, Succinimonas amylolytica, Succinivibrio dextrinicolvens, Wolinella succinogenes, etc., as well as by various Lactobacillus strains.

[0199] Succinic acid is currently marketed as a surfactant/detergent/extender/foaming agent. Succinic acid is also useful as an ion chelator. For instance, succinic acid is commonly utilized in electroplating in order to reduce corrosion or pitting of metals.

[0200] Succinic acid is also utilized in the food industry, for example, as an acidelant/pH modifier, a flavoring agent (e.g., in the form of sodium succinate), and/or an anti-microbial agent. Succinic acid can also be employed as a feed additive. Succinic acid can be utilized to improve the properties of soy proteins in food or feed through the succinylation of lysine residues.

[0201] Succinic acid also finds utility in the pharmaceutical/health products market, for example in the production of pharmaceuticals (including antibiotics), amino acids, vitamins, etc.

[0202] Succinic acid can also be utilized as a plant growth stimulant.

[0203] Succinic acid, like malic and fumaric acid, further can be employed as an industrial chemical in the commodity and/or specialty chemicals markets, for example as an intermediate in the production of compounds such as adipic acid (e.g., for use as the precursor to nylon and/or in the manufacture of lubricants, foams, and/or food products), 4-amino butanoic acid, aspartic acid, 1,4-butanediol (e.g., for use as a solvent and/or as raw material for production of polybutylene terephthalate resins and/or automotive or electrical parts), diethyl succinate (e.g., for use as a solvent for cleaning metal surfaces or for paint stripping), ethylenediaminedisuccinate (e.g., as a replacement for EDTA), fumaric acid, gamma-butyrolactone (e.g., for use in paint removers and/or textile products, and/or as the raw material for production of pyrrolidone derivatives), hydroxysuccinimide, itaconic acid, maleic acid, maleic anhydride, maleimide, malic acid, N-methylpyrrolidone (e.g., for use as a solvent), 2-pyrrolidione, succinimide, tetrahydrofuran (e.g., for use as a solvent and/or in adhesives, printing inks, magnetic tapes, etc), or other 4-carbon compounds. Succinic acid can also be useful for the production of polymers (including biodegradable polymers) such as polybutylene terephthalate and polybutylene succinate These succinate derivatives may be produced by any number of processes including physical treatments, fermentation, biocatalysis, chemical transformation and combinations thereof.

[0204] Succinic acid can also be utilized to modify other compounds and thereby to improve or adjust their properties. For example, succinylation of proteins (e.g., on lysine residues) can improve their physical or functional attributes; succinylation of cellulose can improve water absorbitivity; succinylation of starch can enhance its utility as a thickening agent, etc.

### Tartaric Acid

[0205] Tartaric acid (FIG. 28c) is found in the juice of many fruits, and is the source of the “wine diamond” crystals (of potassium bitartrate) that sometimes form on wine corks. Like other organic acids, tartaric acid can play an important role in fruit juice, acting as a preservative due to its ability to inhibit microbial growth through pH reduction. Tartaric acid is included in many foods, especially sour-tasting sweets. As a food additive, tartaric acid is used as an antioxidant or an emulsifier.

[0206] Tartaric acid is also utilized as a chelator.

[0207] Important derivatives of tartaric acid include its salts, Cream of tartar (potassium bitartrate), Rochelle salt (potassium sodium tartrate, a mild laxative) and tartar emetic (antimony potassium tartrate),

### Host Cells

[0208] Any of a variety of host cells may be engineered to increase the production of one or more organic acid compounds. It will often be desirable to utilize cells that are amenable to manipulation, particularly genetic manipulation, as well as to growth on large scale and under a variety of conditions. In certain cases, it will be desirable to utilize host cells that are amenable to growth under anaerobic conditions, microaerobic conditions, and/or under conditions of relatively low pH.

[0209] In many cases, it will be desirable to utilize yeast or fungal host cells. Any yeast known in the art for use in industrial processes can be used as a matter of routine experimentation by the skilled artisan having the benefit of the present disclosure. For example, the yeast to be modified (e.g., transformed) can be selected from any known genus and species of yeast. Yeasts are described by N. J. W. Kreger-van Rij, “The Yeasts,” Vol. 1 of Biology of Yeasts, Ch. 2, A. H. Rose and J. S. Harrison, Eds. Academic Press, London, 1987. In one embodiment, the yeast genus can be Saccharomyces, Zygosaccharomyces, Candida, Hansenula, Kluyveromyces, Debaromyces, Nadsonia, Lipomyces, Torulopsis, Kloeckera, Pichia, Schizosaccharomyces, Trigonopsis, Brettanomyces, Cryptococcus, Trichosporon, Aureobasidium, Lipomyces, Phaffia, Rhodotorula, Yarrowia, or Schwanniomyces, among others. In a further embodiment, the yeast can be a Saccharomyces, Zygosaccharomyces, Yarrowia, Kluyveromyces or Pichia spp. In yet a further embodiment, the yeasts can be Saccharomyces cerevisiae, Saccharomyces cerevisiae var bayanus (e.g. Lalvin DV10), Saccharomyces boulardii, Zygosaccharomyces bailii, Kluyveromyces lactis, and Yarrowia lipolytica. Saccharomyces cerevisiae is a commonly used yeast in industrial processes, but the invention is not limited thereto. Other yeast species useful in the present disclosure include but are not limited to Hansenula anomala, Schizosaccharomyces pombe, Candida sphaerica, and Schizosaccharomyces malidevorans.

### Engineering Organic Acid Production

[0210] In some cases, a parental cell naturally produces the relevant organic acid compound(s), and is modified to increase production and/or accumulation of the compound(s); in some cases, a parental cell does not naturally produce the relevant organic acid compound(s).

[0211] In general, any modification may be applied to a cell to increase or impart production and/or accumulation of one or more desired organic acid compounds. In many cases, the modification comprises a generic modification. In general, genetic modifications may be introduced info cells by any available means including chemical mutation and/or transfer (e.g., via transformation or mating) of nucleic acids. A nucleic acid to be introduced into a cell according to the present invention may be prepared by any available means. For example, it may be extracted from an organism's nucleic acids or synthesized by chemical means. Nucleic acids to be introduced into a cell may be, but need not be, in the context of a vector.

[0212] Genetic modifications that increase activity of a polypeptide include, but are not limited to: introducing one or more copies of a gene encoding the polypeptide (which may differ from any gene already present in the host cell encoding a polypeptide having the same activity); altering a gene present in the cell to increase transcription or translation of the gene (e.g., altering, adding additional sequence to, deleting sequence from, replacement of one or more nucleotides, or swapping for example, a promoter, regulatory or other sequence); and altering the sequence (e.g. coding or non-coding) of a gene encoding the polypeptide to increase activity (e.g., by increasing catalytic activity, reducing feedback inhibition, targeting a specific subcellular location, increasing mRNA stability, increasing protein stability).

[0213] Genetic modifications that decrease activity of a polypeptide include, but are not limited to: deleting all or a portion of a gene encoding the polypeptide; inserting a nucleic acid sequence that disrupts a gene encoding the polypeptide; altering a gene present in the cell to decrease transcription or translation of the gene or stability of the mRNA or polypeptide encoded by the gene (for example, by altering, adding additional sequence to, deleting sequence from, replacement of one or more nucleotides, or swapping for example, a promoter, regulatory or other sequence).

[0214] A vector for use in accordance with the present methods can be a plasmid, linear piece of DNA, a cosmid, or a yeast artificial chromosome, among others known in the art to be appropriate for use in yeast. A vector can comprise an origin of replication, which allows the vector to be passed on to progeny cells of a parent cell comprising the vector. Alternatively, if integration of the vector into the host cell genome is desired, the vector can comprise sequences that direct such integration (e.g., specific sequences or regions of homology, etc.).

[0215] Nucleic acids to be introduced into a cell may be so introduced together with at least one detectable marker (e.g., a screenable or selectable marker). In some embodiments, a single nucleic add molecule to be introduced may include both a sequence of interest (e.g., a gene encoding a polypeptide of interest as described herein) and a detectable marker. In general, a detectable marker allows cells that have received an introduced nucleic acid to be distinguished from those that have not. For example, a selectable marker may allow transformed cells to survive on a medium comprising an antibiotic fatal to untransformed yeast, or may allow transformed cells to metabolize a component of the medium into a product not produced by untransformed cells, among other phenotypes.

[0216] As will be appreciated, nucleic acids can be introduced into cells by any available means including, for example, chemical-mediated transformation, particle bombardment, electroporation, Agrobacterium-mediated transformation, etc.

[0217] Nucleic acids to be expressed in a cell are typically in operative association with one or more expression sequences such as, for example, promoters, terminators, and/or other regulatory sequences. Any such regulatory sequences that are active in the host cell (including, for example, homologous or heterologous host sequences, constitutive, inducible, or repressible host sequences, etc.) can be used.

[0218] A promoter, as is known, is a DNA sequence that can direct the transcription of a nearby coding region. A promoter can be constitutive, inducible or repressible. Constitutive promoters continually direct the transcription of a nearby coding region. Inducible promoters can be induced by the addition to the medium of an appropriate inducer molecule, which will be determined by the identity of the promoter. Repressible promoters can be repressed by the addition to the medium of an appropriate repressor molecule, which will be determined by the identity of the promoter.

[0219] Representative useful promoters include, for example, the constitutive promoter S. cerevisiae triosephosphate isomerase (TPI) promoter, the S. cerevisiae glyceraldehyde-3-phosphate dehydrogenase (isozyme 3) TDH3 promoter, the S. cerevisiae TEF1 promoter and the S. cerevisiae ADH1 promoter. Representative terminators for use in accordance with the present invention include, for example, S. cerevisiae CYC1.

[0220] In some cases, a genetic modification is one that involves disruption of one or more nucleic acid sequences present in a cell. Such disruption may be achieved by any desired means including, for example, chemical disruption and/or integration of disrupting nucleic acid sequences, etc.

[0221] Alternatively or additionally, a genetic modification may comprise introduction of one or more new nucleic acids into a cell. In some cases, the introduced nucleic acid sequences may be from a heterologous source; in some embodiments, introduced nucleic acid sequences may represent additional or alternative copies of sequences already present in the cell.

[0222] In some cases, introduced or disrupted nucleic, acid sequences encode one or more anaplerotic polypeptides and/or one or more C4-dicarboxylic acid biosynthetic polypeptides and/or one or more GSR polypeptides and/or one or more hexose transporter polypeptides and/or one or more organic acid transporter (OAT) polypeptides and/or one or more pyruvate decarboxylase (PDC) polypeptides.

[0223] In some cases, where nucleic acid sequences originating from a source heterologous to the host cell are utilized, such sequences may be modified, for example, to adjust for codon preferences and/or other expression-related aspects (e.g., linkage to promoters and/or other regulatory sequences active in the host cell, etc.) of the host cell system.

[0224] In some cases, polypeptides or nucleic acid sequences introduced into or present within a host cell may contain, sequences that alter localization and/or site of activity of a polypeptide, and particularly of a C4-dicarboxylic acid biosynthetic or an OAT polypeptide. In some cases, for example, it may be desirable for polypeptides involved in organic acid production in modified host cells to be present and/or active in the cytosol. Localizing sequences (e.g., sequences that target polypeptides to the cytosol, to and organelle such as the mitochondria, to membranes, for secretion, etc.) may be added to or removed from utilized nucleic acids.

[0225] Cells may be modified to produce and/or accumulate one or more organic acids by any biosynthetic route. Representative paths for the production of organic acid such as malic add, fumaric acid, succinic acid and tartaric acids are shown in FIGS. 28e, 28f and 28g.

[0226] In some cases, a cell is modified to increase its anaplerotic activity. Alternatively or additionally, a cell may be modified to decrease pyruvate decarboxylase activity, to increase or decrease organic acid transport activity, to increase or decrease glucose sensing and regulatory polypeptide activity, to increase or decrease hexose transporter (HXT) activity, and/or to increase or decrease C4 dicarboxylic acid biosynthetic activity. In some embodiments, a cell contains at least two or more such modifications.

[0227] Representative modifications that increase anaplerotic activity include, for example, those that increase pyruvate carboxylase (PYC) activity, those that increase phosphoenolpyruvate carboxylate (PPC) activity, those that increase or decrease phosphoenolpyruvate carboxykinase (PCK) activity, those that increase or decrease pyruvate kinase (PYK) activity, those that increase biotin protein, ligase (BPL) activity, those that increase biotin transport protein (VHT) activity, those that increase or decrease bicarbonate transport activity, and/or those that increase carbonic anhydrase activity.

[0228] Production and Isolation of Organic Acids After a modified (e.g., recombinant) yeast has been obtained, the yeast can be cultured in a medium. The medium in which the yeast can be cultured can be any medium known in the art to be suitable for this purpose. Culturing techniques and media are well known in the art. In one embodiment, culturing can be performed by aqueous fermentation in an appropriate vessel. Examples for a typical vessel for yeast fermentation comprise a shake flask or a bioreactor.

[0229] The medium can comprise a carbon source such as glucose, sucrose, fructose, lactose, galactose, or hydrolysates of vegetable matter, among others. In some cases, the medium can also comprise a nitrogen source as either an organic or an inorganic molecule. Alternatively or additionally, the medium can comprise components such as amino acids; purines; pyrimidines; corn steep liquor; yeast extract; protein hydrolysates; water-soluble vitamins, such as B complex vitamins; inorganic salts such as chlorides, hydrochlorides, phosphates, or sulfates of Ca, Mg, Na, K, Fe, Ni, Co, Cu, Mn, Mo, or Zn, among others. Further components known to one of ordinary skill in the art to be useful in yeast culturing or fermentation can also be included. The medium can be buffered but need not be. Considerations for selection of medium components include but are not limited to productivity, cost, and impact on the ability to recover desired products (e.g. organic acid(s)).

[0230] The carbon dioxide source can be gaseous carbon dioxide (which can be introduced to a headspace over the medium or sparged through the medium) or a carbonate salt (for example, calcium, carbonate), for example, incorporated into the medium.

[0231] During the course of the fermentation, the carbon source is internalized by the yeast and converted, through a number of steps, into an organic acid (e.g. malic, fumaric, succinic, or tartaric acid). Expression of an OAT polypeptide, including but not limited to MAE polypeptides, allows the organic acid so produced to be secreted by the yeast into the medium.

[0232] An exemplary medium is mineral medium containing 50 g/L CaCO₃ and 1 g/L urea.

[0233] According to the present invention, a host cell is modified to increase its production of one or more organic acid compounds. The modified fungal cell can be cultured under conditions and for a time sufficient for organic acid (e.g. malic, fumaric, succinic, or tartaric acid) to accumulate. In some cases, such modification increases production of the relevant compound at least about 1.1-fold, at least about 2-fold, at least about 5-fold, at least about 10-fold, at least about 20-fold, at least about 35-fold, at least about 50-fold as compared with an otherwise identical host cell lacking the modification.

[0234] According to the present invention, a modified fungal cell can be cultured under conditions and for a time sufficient for organic acid (e.g. malic, fumaric, succinic, or tartaric acid) to accumulate. For example, the organic acid may accumulate to about 0.3 moles of organic acid/moles of substrate, about 0.35 moles of organic acid/moles of substrate, about 0.4 moles of organic acid/moles of substrate, about 0.45 moles of malic organic acid/moles of substrate, 0.5 moles of organic acid/moles of substrate, about 0.55 moles of organic acid/moles of substrate, about 0.6 moles of organic acid/moles of substrate, about 0.65 moles of organic acid/moles of substrate, about 0.7 moles of organic acid/moles of substrate, about 0.75 moles of organic acid/moles of substrate, about 0.8 moles of organic acid/moles of substrate, about 0.85 moles of organic acid/moles of substrate, about 0.9 moles of organic acid/moles of substrate, about 0.95 moles of organic acid/moles of substrate, about 1 moles of organic acid/moles of substrate, about 1.05 moles of organic acid/moles of substrate, about 1.1 moles of organic acid/moles of substrate, about 1.15 moles of organic acid/moles of substrate, about 1.2 moles of organic acid/moles of substrate, about 1.25 moles of organic acid/moles of substrate, about 1.3 moles of organic acid/moles of substrate, about 1.35 moles of organic acid/moles of substrate, about 1.4 moles of organic acid/moles of substrate, about 1.45 moles of organic acid/moles of substrate, about 1.5 moles of organic acid/moles of substrate, about 1.55 moles of organic acid/moles of substrate, about 1.6 moles of organic acid/moles of substrate, about 1.05 moles of organic acid/moles of substrate, about 1.7 moles of organic acid/moles of substrate, about 1.75 moles of organic acid/moles of substrate. In some embodiments, the organic acid, accumulates in the medium. In some embodiments the substrate is glucose.

[0235] We have observed that culturing a recombinant yeast in mineral medium comprising 50 g/L CaCO₃ and 1 g/L urea can lead to levels of organic acid (as acid) in the medium of at least 1 g/L. In some cases, it can lead to levels of organic acid (as acid) in the medium of at least 10 g/L. In other cases, it can lead to levels of organic acid (as acid) in the medium of at least 30 g/L.

[0236] Thus, in certain cases, the organic acid (e.g. malic, fumaric, succinic, or tartaric acid) accumulates in the medium to at least about 20 g/L, at least about 30 g/L, at least about 40 g/L, at least about 50 g/L, at least about 60 g/L, at least about 70 g/L, at least about 80 g/L, at least about 9.0 g/L, at least about 100 g/L, at least about 110 g/L, at least about 120 g/L, at least about 130 g/L, at least about 140 g/L, at least about 150 g/L, at least about 160 g/L, at least about 170 g/L, at least about 180 g/L, at least about 190 g/L, at least about 200 g/L.

[0237] Modified yeast can be cultured under conditions where the acidic pit of the medium promotes the accumulation of soluble free organic acid (e.g. malic, fumaric, succinic, or tartaric acid) as the major product form, thereby decreasing economic and environmental costs that result from the need to remove impurities or by-products such as calcium sulfate (gypsum). Thus, in certain cases, the organic acid accumulates in a medium of a pH of at least less than 5.0, at least less than 4.5, at least less than 4.0, at least less than 3.5, at least less than 3.0, at least less than 2.5.

[0238] After culturing has progressed for a sufficient length of time to produce a desired concentration of organic acid (e.g., malic, fumaric, succinic, or tartaric acid), the organic acid can be isolated. Specifically, the organic acid can be brought to a state of greater purity by separation of the organic acid from at least one other component (either another organic acid or a compound not in that category) of the yeast of the medium. In some cases, the organic acid is at least about 50%, 55%, 60%, 65%, 70%, 75%, 80%, 85%, 90%, 95%, 96%, 97%, 98%, 99%, pure or more. In some cases, the isolated organic acid is at least about 95% pure, such as at least about 99% pure.

[0239] Any available technique can be utilized to isolate fee accumulated organic acid (e.g., malic, fumaric, succinic, or tartaric acid). For example, the isolation can comprise purifying the organic acid from the medium by known techniques, such as the use of an ion exchange resin, activated carbon, microfiltration, ultrafiltration, nanofiltration, liquid-liquid extraction, crystallization, or chromatography, among others. Liquid-liquid extraction is a preferred method for recovering protonated carboxylic acids such as malic and/or succinic add from as aqueous medium. Liquid-liquid extraction is generally performed using a reactive long-chain aliphatic tertiary amine (e.g. triisooctylamine or tridodecylamine) in an extractant containing a modifier (e.g. n-octanol), which enhances the extracting power of the reactive amine, and an inert, diluent (e.g. n-heptane). Other organic acid recovery and extraction methods include those disclosed in U.S. Pat. Nos. 4,670,155, 5,143,833, 5,168,055, 5,034,105, 5,426,220, 5,104,492, 5,510,526, 5,780,276, 5,773,653, 5,412,126, Hanson J (1971) Recent advances in liquid-liquid extraction. Pergmon, Oxford, and Eggeman and Verser (2005) Appl Biochem Biotechnol. 121-124:605-18 including the references cited therein.

### EXEMPLIFICATION

[0240] The following examples are included to demonstrate preferred embodiments of the invention. It should be appreciated by those of skill in the art that the techniques disclosed in the examples which follow represent techniques discovered by the inventor to function well in the practice of the invention, and thus can be considered to constitute preferred modes for its practice. However, those of skill in the art should, in light of the present disclosure, appreciate that marry changes can be made in the specific embodiments which are disclosed and still obtain a like or similar result without departing from the spirit and scope of the invention.

### Example 1

[0241] Two yeast strains were constructed starting with S. cerevisiae strain TAM (MATa pdc1(−6,−2)::loxP pdc5(−6,−2)::loxP pdc6(−6,−2)::loxP ura3-52 (PDC-negative)), which was transformed with genes encoding a pyruvate carboxylase (PYC), a malate dehydrogenase (MDH), and a malate transporter protein (MAE).

[0242] Because the TAM strain has only one auxotrophic marker, we disrupted the TUP1 locus in order to be able to introduced more than one plasmid with an auxotrophic marker, resulting in RWB961 (MATα pdc1(−6,−2)::loxP pdc5(−6,−2)::loxP pdc6(−6,−2)::loxP mutx ura3-52 trp1::Kanlox).

[0243] The MDH and PYC genes we used had been previously cloned into plasmids p426GPDMDH3 (2μ plasmid with URA3 marker, containing the MDH3ΔSKL gene between the S. cerevisiae THD3 promoter and the S. cerevisiae CYC1 terminator, FIG. 3) and pRS2 (2μ plasmid with URA3 marker containing the S. cerevisiae PYC2 gene, FIG. 4).

[0244] A P_{TDH3}-SpMAE1 cassette carrying the S. pombe MAE was recloned into YEplac112 (2μ, TRP1) and YIplac204 (integration, TRP1), resulting in YEplac112SpMAE1 (FIG. 6) and YIplac204SpMAE1 (not shown).

[0245] A PYC and MDH vector was prepared: pRS2MDH3ΔSKL (2μ, UMA3, PYC2, MDH3ΔSKL) (FIG. 5).

[0246] RWB961 was transformed with pRS2MDH3ΔSKL and YEplac112SpMAE1 (strain 1) or pRS2MDH3ΔSKL and YIplac204SpMAE1 (strain 2). Both strain 1 and strain 2 overexposed PYC2 and MDH3ΔSKL, but had different levels of expression for the MAE, assuming expression levels were proportional to plasmid copy number, about 10-40 per cell for YEplac112SpMAE1 (2μ-based) and about 1-2 per cell for YIplac204SpMAE1 (integrated).

[0247] After isolation of strain 1 and strain 2, 0.04 g/L or 0.4 g/L of each strain was introduced to a 500 ml shake flask containing 100 ml mineral medium, 50 g/L CaCO₃, and 1 g/L urea. Flasks were shaken at 200 rpm for the duration of each experiment. Samples of each culture medium were isolated at various times and the concentrations of glucose, pyruvate, glycerol, succinate, and malate determined. Extracellular malate concentrations of about 250 mM after about 90˜160 hr were observed. Results are shown in FIGS. 1-2.

[0248] The results indicate that the following modifications to yeast metabolic pathways allow high levels of extracellular malate accumulation by recombinant yeasts:

[0249] 1. Direct the pyruvate flux towards pyruvate carboxylase (by reducing PDC activity).

[0250] 2. Increase flux through pyruvate carboxylase by overexpressing PYC.

[0251] 3. Introduce high malate dehydrogenase activities in the cytosol to capture oxaloacetate formed by PYC.

[0252] 4. introduce a heterologous malic acid transporter to facilitate export of malate.

[0253] FIG. 2 also shows that extracellular succinate concentrations of about 50 mM could be produced simultaneously with the malate production described above.

### Example 2

[0254] The effect of carbon dioxide on malate production in a fermenter system was studied using a TAM strain overexpressing PYC2, cytosolic MDH3, and a S. pombe MAE1 transporter (YEplac112SpMAE1), as described in Example 1. Three fermenter experiments were performed:

[0255] A: Batch cultivations under fully aerobic conditions.

[0256] B: Batch cultivations under fully aerobic conditions with a mixture of N₂/O₂/CO₂ of 70%/20%/10%.

[0257] C: Batch cultivations under fully aerobic conditions with a mixture of N₂/O₂/CO₂ of 65%/20%/15%

[0258] Protocol

[0259] Media

[0260] The mineral medium contained 100 g glucose, 3 g KH₂PO₄, 0.5 g MgSO₂.7H₂O and 1 ml trace element solution according to Verduyn et al (Yeast 8: 501-517, 1992) per liter of demineralized water. After heat sterilization of the medium 20 min at 110° C., 1 ml filter sterilized vitamins according to Verduyn et al (Yeast 8: 501-517, 1992) and a solution containing 1 g urea were added per liter. Addition of 0.2 ml per liter antifoam (BDH) was also performed. No CaCO₃ was added.

[0261] Fermenter Cultivations

[0262] The fermenter cultivations were carried out in bioreactors with a working volume of 1 liter (Applikon Dependable Instruments, Schiedam, The Netherlands). The pH was automatically controlled at pH 5.0 by titration with 2 M potassium hydroxide. The temperature, maintained at 30° C., is measured with a Pt100-sensor and controlled by means of circulating water through a heating finger. The stirrer speed, using two rushton impellers, was kept constant at 800 rpm. For aerobic conditions, an air flow of 0.5 l·min⁻¹ was maintained, using a Brooks 5876 mass-flow controller (Brooks B V, Veenendaal The Netherlands), to keep tire dissolved-oxygen concentration above 60% of air saturation at atmospheric pressure.

[0263] In batches B and C, increased carbon dioxide concentration of 10% or 15% while maintaining a good oxygenation was reached by mixing pressurized air 79% N₂+21% O₂ and a gas mixture containing 79% CO₂+21% O₂ (Hoekloos, Schiedam, the Netherlands). The desired percentage of 10% or 15% CO₂ supplied via a Brooks mass-flow controller, was topped up with pressurized air to a fixed total flow rate of 0.5 L/min.

[0264] The pH, DOT and KOH/H2SO4 feeds were monitored continuously using an on-line data acquisition & control system (MFCS/Win, Sartorius BBI Systems).

[0265] Off-Gas Analysis

[0266] The exhaust gas of the fermenter cultivations was cooled in a condenser (2° C.) and dried with a Perma Pure dryer (type PD-625-12P). Oxygen and carbon dioxide concentrations were determined with a Rosemount NCSA 2000 gas analyser. The exhaust, gas flow rate was measured with a Saga Digital flow meter (Ion Science, Cambridge). Specific rates of carbon dioxide production and oxygen consumption were calculated as described by van Urk et al (1988. Yeast 8: 501-517).

[0267] Sample Preparation

[0268] Samples for biomass, substrate and product analysis were collected on ice. Samples of the fermentation broth and cell tree samples (prepared by centrifugation at 10.000×g for 10 minutes) were stored at −20° C. for later analysis.

[0269] Determinations of Metabolites

[0270] HPLC-Determination

[0271] Determination of sugars, organic acids and polyols were determined simultaneously using a Waters HPLC 2090 system equipped with an HPX-87B Aminex ion exclusion column (300×7.8 mm, BioRad) (60° C., 0.6 ml/min 5 mM H2SO4) coupled to a Waters 2487 UV detector and a Waters 2410 refractive index detector.

[0272] Enzymatic Metabolite Determinations

[0273] In order to verify the HPLC measurements and/or exclude separation errors, L-malic acid was determined with an enzymatic kit (Boehringer-Mannheim, Catalog No. 0 139 068).

[0274] Determination of Dry Weight

[0275] The dry weight of yeast in the cultures was determined by filtering 5 ml of a culture on a 0.45 μm filter (Gelman Sciences). When necessary, the sample was diluted to a final concentration between 5 and 10 g·l⁻¹. The filters were kept in an 80° C. incubator for at least 24 hours prior to use in order to determine their dry weight before use. The yeast cells in the sample were retained on the filter and washed with 10 ml of demineralized water. The filter with the cells was then dried in a microwave oven (Amana Raderrangs, 1500 Watt) for 20 minutes at 50% capacity. The dried filter with the cells was weighed after cooling for 2 minutes. The dry weight, was calculated by subtracting the weight of the filter from the weight of the filter with cells.

[0276] Determination of Optical Density (QD₆₆₀)

[0277] The optical density of the yeast cultures was determined at 660 nm with a spectrophotometer; Novaspec II (Amersham Pharmasia Biotech, Buckinghamshire, UK) in 4 ml cuvets. When necessary the samples were diluted to yield an optical density between 0.1 and 0.3.

[0278] Batch A: fully aerated 21% O₂ (+79% N₂)

[0279] FIGS. 7 and 8 show metabolite formation against time. The result of one representative batch experiment per strain is shown. Replicate experiments yielded essentially the same results. FIG. 7 denotes the biomass (rectangle), the consumption of glucose (triangle) and the production of pyruvate (star). FIG. 8 denotes production of malate (square), glycerol (upper semi circle), and succinate (octagon). As shown in FIG. 8, the yeast produced about 25 mM malate after 24 hr and about 20 mM succinate after 48 hr.

[0280] Batch B: 10% CO₂+21% O₂(+69% N₂)

[0281] FIGS. 9 and 10 show metabolite formation against time. FIG. 9 denotes the biomass (rectangle), the consumption of glucose (triangle) and the production of pyruvate (star). FIG. 10 denotes production of malate (square), glycerol (upper semi circle), and succinate (octagon). As shown in FIG. 10, the yeast produced about 100 mM malate after 24 hr and about 150 mM malate after 96 hr, as well as about 60 mM succinate after 96 hr.

[0282] Batch C: 15% CO₂+21% O₂(+64% N₂)

[0283] FIGS. 11 and 12 show metabolite formation against time. FIG. 11 denotes the biomass (rectangle), the consumption of glucose (triangle) and the production of pyruvate (star). FIG. 12 denotes production of malate (square), glycerol (upper semi circle), and succinate (octagon). As shown in FIG. 10, the yeast produced about 45 mM malate after 24 hr and about 100 mM malate after 96 hr, as well as about 60 mM succinate after 96 hr.

### Example 3

### Disruption of the PYK1 Gene

[0284] Multiple strategies exist to carboxylate C3-glycolytic pathway intermediates (e.g PEP and pyruvate) to form the oxaloacetate necessary for organic acid (e.g. fumaric acid, malic acid, succinic acid, and tartaric acid) production. As described above, one strategy exploits the overexpression of PYC polypeptides in a strain that has been modified to prevent carbon flow towards ethanol. In the following examples, it is shown how an alternative approach redirects carbon flow from glycolysis to anaplerosis through the increased activity of PPC polypeptides. Preferred aspects of this strategy involve the dampening of the glycolytic flux to pyruvate by manipulations to decrease the activity of pyruvate kinase; these modifications increase the availability of PEP substrate for PPC polypeptides. In a related strategy described in example 19 herein, phosphoenolpyruvate carboxykinase (PCK) polypeptides can be used to catalyze the carboxylation of PEP. Furthermore, it is possible that aspects of more than one of these strategies can be applied in a single strain in order to optimize flux to oxaloacetate and useful C4-dicarboxylic acids such as malic acid, fumaric acid, tartaric acid and succinic acid.

[0285] The disruption of the PYK1 gene is advantageous in a strategy that employs PEP carboxylase (PPC) to generate OAA. Disruption of PYK1 eliminates competition between the introduced PPC and the pyruvate kinase (Pyk) in yeast for PEP. Yeast has two genes coding for pyruvate kinase, PYK1 and PYK2. The product of the PYK1 gene accounts for the majority of the pyruvate kinase activity. The PYK1 gene was deleted in a CEN.PK genetic background, and thus pyk1 disruption strains, which still contained the PYK2 gene, showed, significantly lower pyruvate kinase activities compared to wildtype, 0.05 versus 5 μmol·min⁻¹·mg·protein⁻¹ (see FIGS. 13 and 14). Alternatively strategies for reducing Pyk1 activity have been employed, including the replacement of the wild-type PYK1 gene with the temperature-sensitive alleles of PYK1/CDC19 (see Kabaek D B, et al (1984) Genetics 108 (1): 67-90 (1984)).

[0286] Physiological analysis showed that the strains with the pyk1 disruption no longer produced ethanol, and the strains did not grow on glucose and had to be pre-cultured on ethanol. Introduction of the pAN10ppc plasmid (2μ plasmid, URA3. E. coli ppc (PEP carboxylase) overproduction) in these strains resulted in biomass production on glucose with a growth rate of approximately 0.007 h⁻¹.

[0287] Serial transfer selection experiments with the pyk1 disruption, strains on glucose, aimed at an increased growth rate and higher malate production, resulted in strains which again, produced ethanol (data not shown). This was ascribed to up regulation of the PYK2 gene, thereby compensating for the pyk1 deletion.

### Example 4

### Preparation of Cell-Free Extracts for Enzyme Determinations

[0288] The enzyme samples were obtained from cells growing in chemostat or from shake flasks. When the sample was obtained from shake flask for cells that did not grow on glucose these were first pre-grown on mineral medium with ethanol after which they were transferred, to mineral medium with glucose. For preparation of cell extracts, 62.5 mg of biomass were harvested by centrifugation (5 min at 5000 rpm), washed once and re-suspended in 5 ml freeze buffer (10 mM potassium phosphate buffer (pH 7.5) containing 2 mM EDTA). These samples were stored at −20° C. Before preparation of cell extracts, samples were thawed, washed once and re-suspended in 4 ml sonication buffer (100 mM potassium-phosphate buffer (pH 7.5) containing 2 mM MgCl₂ and 1 mM dithiothreitol). Prior to sonication, a teaspoon of glass beads (425-600 μm diameter) was added. Extracts were prepared by sonication in a Sanyo Soniprep 150-sonicator using a 7-8 μm peak-to-peak amplitude for 4 min at 0.5 min intervals. Unbroken cells and debris were removed by centrifugation at 4° C. (20 min at 36,000×g). The clear supernatant was used as the cell extract (For the analysis of malic enzyme the preparation of cell extract was done in 50 mM Tris-HCl buffer pH 7.5 containing 1 mM DTT and 2 mM MgCl2. Cell extracts were dialyzed for 4 hrs at 0° C. against 50 mM iris buffer by using 0.5-3.0 ml Slyde-a-lyzer cassettes (10,000 MW cutoff, Pierce) (P. de Jong-Gubbels et al. 1998 J. Bact. 180:2875-2882. Identification and characterization of MAE1, the Saccharomyces cerevisiae structural gene encoding mitochondrial malic enzyme).

### Example 5

### Enzyme Assays

[0289] All enzyme activities were coupled to (disappearance of NAD(P)H or acetyl CoA (acetyl CoA measured via DTNB (5,5-dithiobis-(2-nitrobenzoic acid)), which was monitored spectrophotometrically at 340 nm (ε=6.3 l·mM⁻¹·cm⁻¹) or 412 nm (ε=13.6 l·mM⁻¹·cm⁻¹) respectively. Specific activity of the enzymes was calculated after protein determination via the Lowry method. All enzymes are expressed as Units ((mg) protein)⁻¹. One unit equals 1 μmol of substrate converted per minute under the reaction conditions of the assay. Concentrations are given as the final concentration of each component in the reaction mixture (1 ml in a glass cuvette). In all cases, the reaction rates were checked to be linearly proportional to the amount of cell extract added to the assay.

[0290] PYK1—Pyruvate kinase (EC 2.7.1.40):

[0291] Cacodylate (pH 6.2) 100 mM, KCl 100 mM, 10 mM, Fructose 1,6-bisphosphate 1 mM, MgCl₂ 25 mM, NADH 0.15 mM, L-Lactate dehydrogenase 11.25 U. Start reaction with:

[0292] Phosphoenolpyruvate (2 mM).

[0293] MDH2-Malate-dehydrogenase (EC 1.1.1.37):

[0294] Potassium phosphate buffer (pH 8.0) 100 mM, NADH or NADPH 0.15 mM. Start reaction with oxaloacetate (1 mM).

[0295] HXK2—Hexokinase (EC 2.7.1.1):

[0296] Imidazole-HCl (pH 7.6) 50 mM, NADP+1 mM, MgCl₂ 10 mM, Glucose 10 mM, Glucose-6-P dehydrogenase 1.8 U. Start reaction with ATP (1 mM).

[0297] PPC—E. coli PEP carboxylase—pyruvate carboxylase (4.1.132):

[0298] Imidazole-HCl (pH 6.6) 100 mM, NaHCO₃ 50 mM, MgCl₂ 2 mM, Glutathione 2 mM, ADP 2.5 mM, NADH 2.5 mM, MDH 3 U. Start reaction with: Phosphoenolpyruvate (2.5 mM).

[0299] PPC—E. coli PEP carboxylase—pyruvate carboxylase (4.1.1.32):

[0300] (alternative assay based on Acetyl-CoA)

[0301] Tris-HCl (pH 7.5) 100 M, MgSO₄ 10 mM, KHCO₃ 10 mM, AcCoA 20 mM, KHCO₃ 10 mM, DTNB (5,5-dithiobis-(2-nitrobenzoic acid))/Tris 0.1 mM, citrate synthetase. Start reaction with PEP (5 mM)

[0302] Pyruvate carboxylase (4.1.1.32):

[0303] (alternative assay based on Acetyl-CoA)

[0304] Tris-SO₄ (pH 7.5) 100 M, MgSO₄ 7.5 mM, KHCO₃ 20 mM, AcCoA 0.1 mM, KHCO₃ 20 mM, DTNB (5,5-dithiobis-(2-nitrobenzoic acid))/Tris 0.1 mM, ATP 0.4 mM, Citrate synthetase, Start reaction with K-pyruvate (10 mM).

[0305] MAE-Malic enzyme (EC 1.1.1.40):

[0306] Tris-HG (pH 7.5) 0.1 M, NADP+0.4 mM, MgCl₂ 10 mM. Start reaction with L-Malate (100 mM).

### Example 6

### Disruption of the HXK2 Gene

[0307] High glucose and sucrose concentrations result in repression of respiratory enzymes, thus limiting, the malate production. Disruption of the HXK2 gene has been shown to result in a complete derepression of the respiratory enzymes in the presence of high glucose concentrations (Diderich et al (2001) Appl. Environ. Microbiol, 67:1587-1593; Raamsdonk et al (2001) Yeast 18:1023-1033). Strains were generated that contained hxk2 deletions. Strains with the hxk2 deletion exhibited a lower hexokinase activity than the wild-type strains, respectively 0.5 versus 1.2 μmol·min⁻¹·mg·protein⁻¹ (see FIGS. 13 and 14). In media containing 2% glucose, the rate of glucose consumption in hxk2 pyk1 deleted strains was higher than the strains still containing HXK2. At glucose concentrations of 10%, however, strains containing hxk3 and pyk1 disruptions did not consume glucose (see FIG. 15).

### Example 7

### Overproduction of E. coli PPC

[0308] Overproduction of E. coli PEP carboxylase was achieved using the pAN10ppc plasmid (Flores and Gancedo (1997) FEES Lett. 412: 531-534), containing E. coli ppc gene behind the S. cerevisiae ADH1 promoter. The average in vitro PEP carboxylase activity varied from 4.0-7.4 μmol·min⁻¹·mg·protein⁻¹, depending on the strain and the shake flask conditions (see FIG. 13). The cultivation of the strains containing the pAN10 ppc construct (see FIG. 13) on mineral medium with 2% glucose yielded mainly glycerol, carbon dioxide and succinate (see FIG. 15) in comparable yields. The hxk2 disrupted strain consumed the glucose in 70 hours, versus 118 hours for the strain with HXK2.

[0309] The E. coli PEP carboxylase was active in vitro but there was no significant malate production. Some malate production was expected since Bauer et al ((1999) FEMS Microbiol. Lett. 179:107-113) reported intracellular malate production when over-expressing native pyruvate carboxylase and thus producing cytosolic oxaloacetate. The main products of the constructed strains consisted of glycerol, carbon-dioxide and succinate. In shake flask conditions on 10% glucose and with oxygen limitation glycerol yields up to 1 mol glycerol per mol of glucose were observed.

### Example 8

### Overexpression of MDH2

[0310] Initial attempts to increase cytosolic malate dehydrogenase activity utilized strains that had the TPI1 promoter (P_{TP1}) integrated in front of the chromosomal MDH2 gene, thereby replacing its own promoter (obtained from Peter Kotter (Department of Microbiology Wolfgang Goethe Universitat, Frankfurt). The two strains, CEN.PK653-1C and 655-C, were also both disrupted pyk1 and hxk2. The strains differed in that one had PPC overexpression (pAN10ppc) and the other did not (see FIG. 14).

[0311] As can be seen in FIGS. 14 and 16, strains with the P_{TP1}-MDH2 construct did not show an increase in the total in vitro malate-dehydrogenase activity or an increased malate production when compared to wild-type strain, CEN.PK 113-13d. To see if the lack of malate production was due to a transport problem, the intracellular malate concentrations of shake flask grown strains on mineral medium with glucose was also measured. Samples were prepared as in examples 9A and 9B herein. No significant malate build-up was observed (see FIG. 17). The main products of the bioconversion were glycerol, carbon dioxide and succinate. The glycerol production in the pyk1Δhxk2ΔpAN10ppc P_{TP1}-MDH2 strain on 10% glucose in an oxygen limited environment obtained mol per mol ratios for glucose versus glycerol resulting in 0.332 M glycerol.

[0312] A lack of observed increased malate dehydrogenase activity may have occurred because Mdh2 is actively degraded when grown on glucose (Minard and McAlister-Henn (1992) J Biol Chem. August 25; 267(24):17458-64).

### Example 9A

### Preparation of Samples for Intracellular Metabolite Measurements

[0313] Biomass samples (4 ml of a 4 g dry weight/l suspension) were taken from an anaerobic fermentation assay and immediately quenched with 20 ml 60% methanol at −40° C. After washing the cells twice with cold 60% methanol, intracellular metabolites were extracted by resuspending the cell pellets in 5 ml of boiling 75% ethanol and incubating them for 3 min at 80° C. Cell debris and intracellular metabolites were dried at room temperature with a vacuum, evaporator (Savant Automatic Environmental SpeedVac® System type AES1010). Finally, 0.5 ml of demineralized water was added. The resulting suspension was stored at −20° C. Before metabolite analysis, the suspension was centrifuged.

### Example 9B

### Quantification of Organic Acids, Glucose, and Glycerol

[0314] Organic acids, glucose, and glycerol levels were quantified from broth samples using HPLC analysis. The instrumentation for detection was comprised of a Waters 717 Plus auto sampler fronting a Waters 515 pump, which was coupled to both a Waters 2414 refractive index (RI) detector and a Waters 2487 UV detector. An Aminex HPX-87H ion exclusion column (300 mm×7.8 mm, Bio-Rad), with Aminex HPX-87H guard column (20 mm×7.8 mm guard column, Bio-Rad), was used for separation, UV detection was typically employed to quantify organic acids, whereas RI detection enabled quantification of dextrose and glycerol; in many instances, malic acid defection also was performed using RI detection due to the overlap of malic acid and pyruvic acid peaks in chromatograms from UV detection.

[0315] Samples were prepared, from HPLC analysis by first centrifuging (3600 rpm) harvested shake flask cultures and transferring supernatant to a fresh Eppendorf tube. Samples were diluted 50-fold info mobile phase, and the resulting preparations were loaded onto the 96 vial autosampler carousel, which is maintained at 15° C. 20 μl of diluted sample is used for instrument injection.

[0316] An isocratic separation was performed at 30° C. using 0.05% trifluoracetic acid as the mobile phase at a flow rate of 0.6 mL/min (1400 PSI as high pressure limit). UV detection was performed at 2.10 nm.

### Example 10

### Overexpression of Modified MDH Isoenzymes

[0317] MDH containing plasmids were constructed similar to those described in McAlister-Henn et al (1995) J Biol Chem. 1995 270:21220-5 and Small and McAlister-Henn (1997) Arch Biochem Biophys. 344:53-60. The first was MDH1 gene from, which the first 17 amino acids were removed, MDH1ΔL. Deletion of the first 17 amino acids was expected to allow partial cytosolic relocation with much of Mdh1ΔL still localizing to its normal compartment, the mitochondria. The second construct was the MDH3 gene from which the 3′ SKL sequence was removed. MDH3SKL. Mdh3ΔSKL was expected to localize to the cytosol instead of the peroxisome. Both MDH constructs were expressed from the TDH3 promoter.

[0318] The total in vitro Mdh activity measured in strains with these constructs was over 4 to 20fold that of a wild-type S. cerevisiae strain (CEN.PK113-13D). In shake flask fermentations on glucose, the enzyme activity varied between 20 to 90 μmol·min⁻¹·mg·protein⁻¹ (FIG. 18).

[0319] The sub-cellular fractionation of a wild-type strain, expressing Mdh3ΔSKL from the TDH3 promoter, grown in a nitrogen-limited continuous culture, showed that over 60% of the total Mdh activity was cytosolic. The rest of the activity was associated with the membrane fraction, which includes the mitochondria and peroxisomes.

[0320] Additional proof for the localization of the mutated Mdh enzymes was obtained by complementing mdh mutants. A S. cerevisiae strain with a deletion of the MDH1 gene, coding for mitochondrial Mdh, cannot grow with acetate as the carbon source, while deletion of the MDH2 gene, coding for the cytosolic Mdh, results in an inability to grow on mineral media with acetate or ethanol as the carbon source. Transformation of an mdh2 strain with plasmids containing MDH1ΔL and MDH3ΔSKL showed that both could complement the phenotype and therefore both, are active in the cytosol. Transformation of an mdh1 mutant with the same constructs showed that MDH3ΔSKL could not complement the mdh1 phenotype (no growth on acetate) while MDH1ΔL could. Therefore Mdh3ΔSKL is only active in the cytosol, not in the mitochondria, while MdhΔL is active in both compartments.

[0321] Cultivation of S. cerevisiae CEN.PK.113-32D (wt) with p425GPDMDH13ΔSKL (2μ plasmid, LEU2, TDH3 promoter (GPD is glyceraldehyde-3-phosphate dehydrogenase (TDH3)), overproduction MDH3 without terminal SKL sequence) was performed in continuous culture. The cultivations were performed at a growth rate of 0.1 h⁻¹ under nitrogen-limited conditions at pH 5. Metabolite measurements were performed as described in Examples 9A and 9B herein. The malate production did not exceed those found, in wild-type S. cerevisiae strains without the MDH3ΔSKL construct, namely 0.03 g·l⁻¹. The carbon recovery was 97% yielding a stoichiometric balance of:

C₆H₁₂O₆ (glucose)+0.034NH₃ (ammonia)+0.8O₂→0.71CH_{1.8}O_{0.5}N_{0.2} (biomass)+2.2CO₂+0.02C₃H₈O₃ (glycerol)+0.01C₄H₆O4 (succinate)+0.002C₄H₆O₅ (malate)+0.09C₃H₄O₃ (pyruvate)+1.4C₂H₆O+1.6H₂O.

[0322] Therefore, although in vitro studies showed MDH1ΔL and MDH3ΔSKL increase malate dehydrogenase activity, cultivation of the strains yielded carbon dioxide and biomass as main products and no significant malate production was observed. Further genetic and/or other manipulations (e.g. further comprising malic acid transporter polypeptides) in the context of MDH1ΔL and MDH3ΔSKL comprising strains may yield strains with increased observable malate production.

### Example 11

### Characterization of a Strain Comprising E. coli PEP Carboxylase and P_{TP1}-MDH2

[0323] Quantitative characterization of CEN.PK655-IC (pyk1Δhxk2ΔP_{TP1}-MDH2 pAN10ppc) was performed in batch cultivations under oxygen limitation in both shake flask and bioreactors (See FIGS. 17 and 19). Inoculation in a batch bioreactor enabled CO₂ production measurement. The carbon balance showed that 98% of the consumed carbon could be traced, resulting in a stoichiometric balance for the oxygen limited phase of:

C₆H₁₂O₆ (glucose)+0.09NH₃ (ammonia)+XO₂→0.71CH_{1.8}O_{0.5}N_{0.2} (biomass)+2.16CO₂+0.02C₃H₈O₃ (glycerol)+0.02C₄H₆O₄ (succinate)+0.002C₄H₆O₅ (malate)+0.02C₃H₄O₃ (pyruvate)+5.3H₂O.

[0324] The oxygen transfer during the oxygen limited phase was estimated at 1.4 mmol·g⁻¹·h⁻¹. No holes in the carbon balance were observed and the main products were carbon-dioxide and biomass. Intracellular malate concentrations did not show an elevated malate concentration, suggesting malate transport was not problematic (see FIG. 17).

### Example 12

### Combining E. coli PEP Carboxylase with the MDH1ΔL and MDH3ΔSKL Alleles

[0325] Strains comprising E. coli PEP carboxylase with Mdh isoenzyme alleles MDH1ΔL or MDH3ΔSKL were made and tested. Both were expressed from the TDH3 promoter and used to transform strains with disruptions in pyk1 and hxk2. The in vitro enzyme activities measured from extracts of MDH1ΔL and MDH3ΔSKL expressing strains that also expressed E. coli PEP carboxylase were 6 to 12 μmol·min⁻¹·mg·protein⁻¹ for E. coli PEP carboxylase and 20 to 40 μmol·min⁻¹·mg·protein⁻¹ for malate dehydrogenase, respectively (see FIG. 20).

[0326] The strains were characterized in shake flask on 2% and 10% glucose containing mineral medium (see FIG. 21). A batch fermentation in a bioreactor with the RWB505 strain (pyk1Δhxk2ΔpAN10ppc p425GPDMDH3ΔSKL) was conducted. Over the total fomentation 106% of the carbon could be accounted for with production of glycerol, succinate and biomass. For the oxygen limited phase this yielded a stoichiometric balance of:

0.22C₆H₁₂O₆ (glucose)+0.034NH₃ (ammonia) 0.11O₂→0.17CH_{1.8}O_{0.5}N_{0.2} (biomass)+0.53CO₂+0.106C₃H₈O₃ (glycerol)+0.006C₄H₆O₄ (succinate)+0.001C₄H₆O₅ (malate)+0.76H₂O.

[0327] Thus, despite the presence of high in vitro activities for ppc and Mdh, significant malate production was not readily observed. In efforts to further increase malate production, strains were generated that additionally contained deletions in either MAE1 (encoding malic enzyme), FUM1 (encoding fumarase), GPD1 and GPD2 (encoding glycerol-3-phosphate dehydrogenases), and PYK1 and PYK2 (encoding both pyruvate kinase enzymes in yeast). None of these mutations were shown to provide a benefit regarding malic acid production, at least in the genetic and growth contexts in which they were tested.

### Example 13

### Wild-Type and Mutant E. coli PEP Carboxylase Sensitivity to Malate

[0328] Wild-type and E. coli PEP carboxylase mutants were analyzed for inhibition in the presence of malate. Overproduction of E. coli PEP carboxylase was achieved using the pAN10ppc plasmid (Flores and Gancedo (1997) FEBS Lett. 412: 531-534), containing E. coli ppc gene behind the S. cerevisiae ADH1 promoter. Two amino acid changes, K620S and K773G, of E. coli PEP carboxylase have been reported to affect the inhibition of E. coli PEP carboxylase by aspartate and malate (Kai et al (2003) Arch Biochem Biophys. 414:170-9). Oligonucleotide-based site-directed mutagenesis was performed to generate ppc alleles that encoded putative malate-insensitive ppc polypeptides. Two oligonucleotides were designed in order to introduce both these mutations in plasmid pAN10ppc. Both mutant plasmids, pAN10ppcmut5 and pAN10 ppcmut10 were introduced into wild-type S. cerevisiae strain, CEN.PK113-5D.

[0329] Cell extracts from glucose-grown shake-flask cultures were tested to determine the inhibition of malate as described in Examples 4 and 5 herein. The specific activity of wild-type E. coli PEP carboxylase is inhibited in the presence of malate (FIG. 22). In contrast, the specific activities of the pAN10 ppcmut5 and pAN10ppcmut10 versus the wild-type E. coli PEP carboxylase were 0.4, 0.24 and 1.2 μmol·min⁻¹·mg·protein⁻¹ respectively. In the presence of 0.01M malate, the wild-type E. coli PEP carboxylase was fully inhibited while both mutants, K620S (mutant 5) and K773G (mutant 10), still retained 40% of their initial activity (FIG. 23).

### Example 14

### Combination of E. coli ppc Malate Insensitive Allele with Mdh3ΔSKL, pyk1Δ and Other Modifications

[0330] The S. cerevisiae RWB505 (pyk1Δhxk2Δ) was transformed with plasmids pAN10ppcMUTS (encoding E. coli ppc K620S) and p425GPDMDH3ΔSKL. The strains were characterized in shake flask the on 2% and 10% glucose containing mineral medium (see FIG. 24). Comparison between a construct containing the K620S E. coli PEP carboxylase and a strain with wild-type E. coli PEP carboxylase showed no significant increase in the malate production. In contrast, succinate and fumarate levels increased and glycerol levels decreased. The differences may be partially explained by the lower dry weight at the start of the strain bearing the K620S E. coli PEP carboxylase. However, an effect on growth by intracellular build-up of metabolites in the K620S E. coli PEP carboxylase strain can not be excluded. Intracellular metabolite concentration analysis can be performed as in examples 9A and 9B herein, to further test this. Additional genetic manipulation, for example expression of a malic acid transporter such as the S. pombe Mae1 gene, can increase accumulation of extracellular malic acid, for example as in FIG. 19.

### Example 15

### Regulatory Sequences

[0331] Sequences which consist of, consist essentially of, and comprise the following regulatory sequences (e.g. promoters and terminator sequences, including functional fragments thereof) may be useful to control expression of endogenous and heterologous genes in engineered host cells, and particularly in engineered fungal cells described herein.

TDH3 promoter
cagtttatcattatcaatactcgccatttcaaagaatacgtaaataatta
atagtagtgattttcctaactttatttagtcaaaaaattagccttttaat
tctgctgtaacccgtacatgcccaaaatagggggcgggttacacagaata
tataacatcgtaggtgtctgggtgaacagtttattcctggcatccactaa
atataatggagcccgctttttaagctggcatccagaaaaaaaaagaatcc
cagcaccaaaatattgttttcttcaccaaccatcagttcataggtccatt
ctcttagcgcaactacagagaacaggggcacaaacaggcaaaaaacgggc
acaacctcaatggagtgatgcaacctgcctggagtaaatgatgacacaag
gcaattgacccacgcatgtatctatctcattttcttacaccttctattac
cttctgctctctctgatttggaaaaagctgaaaaaaaaggttgaaaccag
ttccctgaaattattcccctacttgactaataagtatataaagacggtag
gtattgattgtaattctgtaaatctatttcttaaacttcttaaattctac
ttttatagttagtcttttttttagttttaaaacaccagaacttagtttcg
acggatt-3′
ADH1 promoter
5′-cgccgggatcgaagaaatgatggtaaatgaaataggaaatcaaggag
catgaaggcaaaagacaaatataagggtcgaacgaaaaataaagtgaaaa
gtgttgatatgatgtatttggctttgcggcgccgaaaaaacgagtttacg
caattgcacaatcatgctgactctgtggcggacccgcgctcttgccggcc
cggcgataacgctgggcgtgaggctgtgcccggcggagttttttgcgcct
gcattttccaaggtttaccctgcgctaaggggcgagattggagaagcaat
aagaatgccggttggggttgcgatgatgacgaccacgacaactggtgtca
ttatttaagttgccgaaagaacctgagtgcatttgcaacatgagtatact
agaagaatgagccaagacttgcgagacgcgagtttgccggtggtgcgaac
aatagagcgaccatgaccttgaaggtgagacgcgcataaccgctagagta
ctttgaagaggaaacagcaatagggttgctaccagtataaatagacaggt
acatacaacactggaaatggttgtctgtttgagtacgctttcaattcatt
tgggtgtgcactttattatgttacaatatggaagggaactttacacttct
cctatgcacatatattaattaaagtccaatgctagtagagaaggggggta
acacccctccgcgctcttttccgatttttttctaaaccgtggaatatttc
ggatatccttttgttgtttccgggtgtacaatatggacttcctcttttct
ggcaaccaaacccatacatcgggattcctataataccttcgttggtctcc
ctaacatgtaggtggcggaggggagatatacaatagaacagataccagac
aagacataatgggctaaacaagactacaccaattacactgcctcattgat
ggtggtacataacgaactaatactgtagccctagacttgatagccatcat
catatcgaagtttcactaccctttttccatttgccatctattgaagtaat
aataggcgcatgcaacttcttttctttttttttcttttctctctcccccg
ttgttgtctcaccatatccgcaatgacaaaaaaatgatggaagacactaa
aggaaaaaattaacgacaaagacagcaccaacagatgtcgttgttccaga
gctgatgaggggtatctcgaagcacacgaaacttttccttccttcattca
cgcacactactctctaatgagcaacggtatacggccttccttccagttac
ttgaatttgaaataaaaaaaagtttgctgtcttgctatcaagtataaata
gacctgcaattattaatcttttgtttcctcgtcattgttctcgttccctt
tcttccttgtttctttttctgcacaatatttcaagctataccaagcatac
aatcaactccaagctggccgct-3′
TEF1 promoter
tagcttcaaaatgtttctactccttttttactcttccagattttctcgga
ctccgcgcatcgccgtaccacttcaaaacacccaagcacagcatactaaa
tttcccctctttcttcctctagggtgtcgttaattacccgtactaaaggt
ttggaaaagaaaaaagagaccgcctcgtttctttttcttcgtcgaaaaag
gcaataaaaatttttatcacgtttctttttcttgaaaattttttttttga
tttttttctctttcgatgacctcccattgatatttaagttaataaacggt
cttcaatttctcaagtttcagtttcatttttcttgttctattacaacttt
ttttacttcttgctcattagaaagaaagcatagcaatctaatctaagtt
t-3′

### Example 16

### pdc Strain Construction and Malic Acid Production Analysis

| | |
|---|---|
| CEN.PK182 | MATa pdc1::loxP pdc5::loxP pdc6::loxP |
| CEN.PK2-1D | MATα ura3-52 trp1-289 leu2-3,112 his3Δ1 |
| RWB837 | MATa ura3-52 pdc1::loxP pdc5::loxP pdc6::loxP |
| TAM | MATa pdc1::loxP pdc5::loxP pdc6::loxP ura3-52 |
| | [URA3 plasmid] *evolved for Glu⁺ (able to |
| | grow in the presence of glucose) Et^{ind} (Ethanol |
| | independent-able to grow in the absence of ethanol) |

CENPK182 was crossed to CEN.PK2-1D

and MATα pdc1 pdc5 ura3 trp1 (MY2219, MY2223, and MY2243 [also his3],) and MATα pdc1 pdc5 pdc6 ura3 trp1 (MY2222, MY2242 [his3] and MY2246 [his3]) progeny were identified.

[0333] RWB837 was transformed with an episomal 2 micron URA3 plasmid (YEpLpLDH) bearing the lactate dehydrogenase gene from Lactobacillus plantarum to create RWB876. RWB876 was subjected to 26 transfers through lactic acid fomentation medium (70 g/L glucose; 5 g/L ethanol) to create m850. Forty-live passages of m850 through the same medium lacking ethanol led to the isolation of Lp4f.

[0334] m850 and Lp4f were cured of their YEpLpDH plasmid, rendered trp1ΔhisG using a hisG-URA3-hisG cassette (i.e. excision of the URA3 marker was accomplished on minimal drop-out plates containing 5-fluoroorotic acid by recombination between, the hisG repeats, resulting in the clean deletion of the TRP1 gene), and serially transformed with pRS2MDH3 ΔSKL and YEplac112SpMAE1 to produce MY2271 and MY2308, respectively. CEN.PK182 was likewise rendered trp1ΔhisG, and along with MY2219, transformed with the same pair of plasmids to create MY2277 and MY2279, respectively.

[0335] MY2308 was crossed to MY2223 and MY2243 and prototrophic Glu⁺ progeny were identified, including MY2518 and MY2524.

[0336] TAM was cured of an episomal URA3 plasmid, rendered trp1ΔhisG using a hisG-URA3-hisG cassette, and serially transformed with pRS2MDH3ΔSKL and YEplac112SpMAE1 to produce MY2264. MY2223, MY2243, MY2222, MY2242, and MY2246 were mated with MY2264 to create the diploid strains MY2300, MY2301, MY2.299, MY2294, and MY2302, respectively.

[0337] FIG. 25 shows fermentation results for these five diploids. It can be observed that the two PDC6/pdc6 strains produced higher malate to pyruvate ratios than that seen with the three pdc6/pdc strains. Ethanol levels were below detection.

[0338] MY2300 was sporulated and plated on minimal ammonia media supplemented with casamino acids (2 g/L), glycerol (10 g/L), and glucose (10 g/L), and prototrophic MATα segregants, including MY2433, were identified, and their pdc6 genotype determined by PCR analysis.

[0339] FIG. 26 shows fermentation results for 13 progeny from this cross. It can be seen that the on average pdc6 progeny produced a lower ratio of malate to pyruvate than did the PDC6⁺ progeny.

[0340] RWB961, MY2264, MY2271, MY2277, MY2279, MY2308, MY2433, MY2518, and MY2524 were compared in multiple fermentations. It was found that MY2433 and MY2518 were capable of producing in excess of 50 g/L malic acid (from 100 g/L glucose), and that MY2308 could produce up to 35 g/L. MY2271, MY2277, and MY2279 produced malic acid at a level not quite approaching that seen with the TAM derivatives RWB961 and MY2264 (20-30 g/L).

### Example 17

### Malate Dehydrogenase Variant

[0341] In order to create a variant of Mdh2 (MDH2-P2S) not subject to catabolite inactivation, we engineered a mutation in the coding sequence that encodes a serine rather than a proline at the second position after the start, codon. MO5448 (5′-CACACACTAGTAGTAACATGTCTCACTCAGTTACACCATCC) and MO5449 (5′-CACACCTCGAGTTAAGATGATGCAGATCTCGATGCA) were used to amplify a 1.0 kb fragment from S. cerevisiae genomic DNA by PCR, which was subsequently cleaved with XhoI and SpeI and ligated to MluI-XhoI-cleaved pRS2MDH3ΔSKL along with the 178 bp MluI-XhoI CYC1t fragment from pRS413TEF, to create pMB4978. When, strains carrying pMB4978 were compared with isogenic strains carrying pRS2MDH3ΔSKL in shake flask fermentations, a consistent improvement was seen. For example, when MY2433 was cured of pRS2MDH3ΔSKL and transformed with pMB4978, the resulting strain produced >25% more malic add in a four-day fermentation (FIG. 27); other experiments and strain backgrounds gave similar results.

### Example 18

### Sequence of PYC2-ext

[0342] In order to create a variant of pRS2MDH3ΔSKL in which the encoded Pyc2 protein (PYC2-ext) possesses the five amino acid carboxy terminal extension that is found in other common, wild type yeast strain backgrounds, we engineered a frameshift mutation in PYC2 by inserting an additional cytosine residue into a consecutive series of four cytosine residues found near the 3′ end of the coding strand ( . . . ATCCCCAAAAA . . . ). MO5265 (5′CACACCGTCTCAGGGGATGGGGGTAGGGTTTC-3′) and MO5183 (5′-GCCAAGGATAATGGTGTTGA-3′) were used to amplify a 1.3 kb fragment from pRS2MDH3ΔSKL DNA that was subsequently cleaved with EagI and BsmBI. MO5266 (5′-CACCGTCTCACCCCAAAAAAAAAGTAATTTTTACTCGTT-3′) and MO5186 (5′-GCAGCAATTAGTTGGCGACA-3′) were used to amplify a 300 bp fragment from pRS2MDH3ΔSKL, that was subsequently cleaved with BsmBI and MluI. These fragments were ligated to the large fragment of EagI- and MluI-cleaved pRS2MDH3ΔSKL to create pMB4968. The PYC2-ext allele in pMB4968 encodes a protein with the carboxy terminal sequence . . . EETLPPSPKKVIFTR(stop), instead of the sequence . . . EETLPPSQKK(stop) encoded by the PYC2 gene of pRS2MDH3ΔSKL. When strains carrying pMB4968 were compared with isogenic strains carrying pRS2MDH3ΔSKL in shake flask fermentations, slightly higher amounts of malic acid were detected with pMB4968 (PYC2-ext). Other factors such as increasing biotinylation capacity or supplemental CO₂ could increase the utility of this allele.

### Example 19

### Phosphoenolpyruvate Carboxykinase (PEPck) DNA and Strain Construction

[0343] A gene encoding the phosphoenolpyruvate carboxykinase (PEPck) protein corresponding to that encoded by Actinobacillus succinogenes was constructed by de novo gene synthesis as follows. The sequence

ttctagaaacaaaatgactgatttgaataaactggttaaggaattaaacg
atttgggactgacagatgtaaaagaaatcgtatataatccaagttacgag
caattattcgaagaagaaactaagccaggattagaaggatttgacaaggg
tacattgacgacactaggggccgtagcggtagatacaggaatttttactg
gcagatctcccaaagataaatatatagtgtgcgatgaaactacgaaagat
accgtatggtggaatagcgaagcagcaaaaaatgataacaaaccaatgac
tcaagaaacatggaaaagcttaagagaattagttgctaaacaattatccg
gtaaaagactatttgttgttgaaggttattgtggtgcgagcgagaaacat
agaatcggtgtgagaatggtgacggaggtagcttggcaagctcattttgt
taaaaatatgtttataagaccaacagatgaagaattgaaaaactttaaag
ccgactttacagtcctaaacggtgctaaatgtactaatccaaattggaag
gagcaaggtttaaattctgaaaatttcgtagcgtttaatattacagaagg
aattcaattaataggaggtacatggtacggaggtgaaatgaaaaagggta
tgttttcgatgatgaattatttcctaccgttaaaaggtgtagcatctatg
cattgcagtgctaacgttggaaaggacggtgatgttgctattttttttgg
tttatccggcacaggaaaaacaaccctatcaactgacccaaaaagacagc
taattggtgatgatgaacatggatgggacgaatcaggtgtctttaatttc
gaaggtgggtgttatgcaaagacaattaatctatcccaagaaaatgaacc
agatatttacggtgctattagaagagatgctttgttagagaacgttgtag
taagagctgacggttccgttgattttgatgatggctccaaaaccgaaaat
actagagtatcttatccaatctaccacatagataacattgttagaccagt
atctaaggccggacatgctactaaggtcatattcctaaccgcagatgctt
tcggtgttcttcccccagtaagtaagttaactcccgaacaaaccgaatac
tatttcctaagtggatttacagctaaattagccggcacagaaagaggcgt
cacagaaccaactccaaccttctccgcttgttttggggccgcatttttgt
cattgcatccaattcaatatgcagatgtattagtagaacgtatgaaagct
agcggcgcagaggcttatttggttaacacaggatggaatggaacaggtaa
aagaatttctattaaagacacaagaggaataattgacgctatattagatg
gaagtattgaaaaggctgaaatgggcgaactaccaatattcaacttagct
atacctaaagctttaccaggggtagatccagcaattttagacccaagaga
cacgtatgcagataaagctcaatggcaagtaaaggcagaagacttagcta
acagattcgtaaaaatttcgtaaagtacaccgctaacccagaagctgcta
aattggttggagctggacccaaggcctaactcgag-3′

[0344] was synthesized, cleaved with XbaI and XhoI, and ligated to pRS416TDH3, pRS416ADH1 and pRS416TEF1 to produce pMB4917, pMB4920, and pMB4919, respectively.

[0345] Primers MO5198 (5′-CACACTCTAGAAACAACATGCAGATCAACGGTATTACCCCG-3′) and MO5199 (5′-CACACCTCGAGTTACCGCTTCGGTCCTGCTTTCAC-3′) were used to amplify Erwinia carotovara DNA (ATCC 33260), and the resultant 1.6 kb fragment was cleaved with XbaI and XhoI and ligated to pRS416TDH3, pRS416ADH1, and pRS416TEF1 to produce pMB4922, pMB4926, and pMB4925, respectively.

[0346] Primers MO5196 (5′-CACACTCTAGAAACAACATGTTAAGTCGTATTGAACAAGAAC-3′) and MO5197 (5′-CACACCTCGAGTTAAAGTTTCGGACCTGCCGCAACT-3′) were used to amplify Actinobacillus pleuropneumoniae DNA (ATCC 27088), and the resultant 1.6 kb fragment was cleaved with XbaI and XhoI and ligated to pRS416TDH3, pRS416ADH1, and pRS416TEF1 to produce pMB4914, pMB4916, and pMB4915, respectively.

[0347] These nine pck plasmids were found to suppress the gluconeogenic defect of a S. cerevisiae pck1 mutant devoid of PEPck activity. Moreover, zpck1 strain harboring pMB49.15 was found to contain PEPck activity when grown on glucose as well as on ethanol, suggesting that the catabolite inactivation of native S. cerevisiae PEPck is not observed with A. pleuropneumoniae PEPck.

[0348] None of the plasmids complemented the anaplerotic defect of S. cerevisiae pyc 1 pyc2 double mutants. Neither the insertion of the SacI-XhoI pck expression cassette from pMB4915 (in both orientations) or from pMB4919 (in one orientation) into pRS2MDH3ΔSKL by blunt end ligation into the unique MluI site, nor the replacement of the resident pRS2MDH3ΔSKL PYC2 gene by blunt end ligation of these cassettes into PstI- and BsiWI-cleaved pRS2MDH3ΔSKL, yielded significant malate yield improvement over that seen with pRS2MDH3ΔSKL in shake flask fermentations. Further experimentation such as one or more of manipulation of strain backgrounds. Introduction of novel pck alleles, CO₂ supplementation, and anaerobic conditions can be tested to improve the anaplerotic capacity of these enzymes.

### Example 20

### Organic Acid Transporters

[0349] Genes encoding putative aluminum-activate organic acid transporters (Oat_{Mal}) proteins corresponding to those encoded by Brassica napus and Triticum secale were constructed by de novo gene synthesis as follows. Two sequences,

ttctagaaacaaaatggaaaaattgcgtgaaatagttagagagggaagaa
gagttggcgaagaggatcccagaagaattgtacactcatttaaagttgga
gtcgcgttggttttagttagctcattttactactatcaaccatttggtcc
atttactgactactttggtataaatgcgatgtgggccgtaatgaccgtcg
ttgttgtttttgaattttctgtcggagctactttaagtaaaggattaaat
agaggtgtcgcaactttagtcgcaggaggcctagcgttaggagcacatca
attggcttcattatcaggaaggactatagaacccattctattggctactt
ttgtatttgttacagcagcacttgctacctttgttcgttttttcccgaga
gttaaggctacatttgattatggaatgctaattttcattctaacttttag
cttaatttccttatcccagtttagagacgaagaaatattagacttagctg
aatcgagattatcaactgtattagttggcggggttagttgtattttaatt
tccatatttgtttgtccagtttgggccggtcaggacttacattcactatt
agtttcaaaccttgatactctaagccactttttacaagaattcggtgatg
aatatttcgaagcgagaacatatggtaatattaaagttgttgaaaagaga
agaagaaaccttgagagatacaaatcagtgctaaactcaaaatccgatga
agattccctagcaaatttcgcaaaatgggaaccaccacatggcaaattcg
gttttagacatccatggaaacaatatttagtcgtcgcagctttagttaga
cagtgcgctcatagaatagatgctttaaactcttatattaattcaaattt
tcaaatcccaatcgatataaaaaagaaattggaagaaccattcaggagaa
tgtcattagaatctggaaaagcaatgaaagaagcttcaattagtctgaaa
aaaatgaccaaatccagcagttacgatatccatataattaatagccaatc
tgcatgcaaagccttatctaccttgttaaaatctggtatattaaacgacg
ttgagccattacaaatggtgagtttactaactacagtttctttattaaat
gacatagttaacataacagaaaaaataagtgaatctgtgagagaattggc
ttccgctgctagattcaggaataaaatgaaacctactgaaccaagtgttt
ccctaaaaaagttagattcaggttctacaggatgtgcaatgccaataaat
tcaagggatggtgatcatgttgtaaccatattacttagtgacgatgataa
agatgatatagatgatgacgatacttcaaatatagtactagacgatgaca
ctattaatgaaaagtctgaagatggtgaaatacatgtacaaaccagttgt
gtaagagaggtgggaatgatgcctgaacattcacttggtgtaagaatatt
gcaaatttaactcgag-3′ (B. napus (B.n.))
ttctagaaacaaaatggatattgatcatggaagagaaatagatggagaaa
tggtttctactattgcgtcatgcggcttgttattgcattccttattagca
ggtttcgcaagaaaggtcggtggtgctgccagagaagatcccagaagagt
tgctcattcattaaaagttggtctagcattggctctagtttcagctgttt
actttgtaacaccattattcaacgggttaggcgttagtgcaatttgggct
gttcttaccgtagtcgtcgttatggagtttaccgtcggtgcaactttaag
taaaggtttaaatagagctttggcaactttagtcgcaggatgtattgctg
tcggagcccatcaattagcagaattaacagaacgttgttcagatcaaggg
gaaccagttatgttgacagtattagttttttttgtcgcatcagcagcaac
atttcttagattcattcccgaaatcaaagcaaaatatgactatggcgtaa
ctatttttatactaactttcggtttagttgctgtttcgtcttacagagtg
gaagaacttattcaattagctcatcaaagattttacacaattgtcgtcgg
agtatttatatgtctatgcacaacggtatttttatttcctgtttgggccg
gagaggacgtccataaattagcttcatcaaatttagggaaattagcgcaa
tttattgaaggtatggaaacaaactgtttggcgaaaacaacatagctatc
aatttagaaggaaaagattttttacaagtatacaaatcggttctgaattc
aaaggccactgaagattctttatgcacttttgcaagatgggaaccaagac
atggtcagtttagatttagacacccctggtctcaatatcaaaaattaggt
acactgtgtagacaatgcgcatcatcaatggaagctttagctagttacgt
tattaccaccacaaagactcaataccccgcagctgcaaatccggaacttt
cttttaaagtcagaaaaacatgtcacgaaatgtctactcatagtgctaaa
gttttaagaggtttagaaatggcaatacgtacaatgacagtcccatactt
agccaacaatacagtcgtagttgcaatgaaggccgccgagagattaagat
cagaattagaagataacgctgcacttttacaggtaatgcatatggctgtt
actgctacgttacttgccgatttagtcgatagagtcaaagaaatcacaga
atgtgttgatgttttagcaagattagcccattttaaaaatcctgaagatg
caaaatacgcaatcgttggtgctttaactagaggaatagatgatcctttg
cctgatgtagttatattataactcgag-3′ (T. secale (T.s))

[0350] were synthesized, cleaved with XbaI and XhoI, and ligated to pRS416TDH3, pRS416TEF1, and pRS416ADH1 to produce pMB4943 (TDH3-B.n.), pMB4944 (TEF1-B.n.), pMB4945 (ADH1-B.n.), pMB4946 (TDH3-T.s.), pMB4947 (TEF1-T.s.), and pMB4948 (ADH1-T.s.); all are URA3-marked plasmids. In addition, analogous constructs were made in a TRP1-marked series of plasmids: pMB4950 (TDH3-B.n.), pMB4952 (TEF1-B.n.), pMB4954 (ADH1-B.n.), pMB4949 (TDH3-T.s.), pMB4951 (TEF1-T.s.), and pMB4953 (ADH1-T.s.).

[0351] Although no evidence for malic transport was observed when compared with the isogenic controls MY2308 (Lp4f[pRS2MDH3ΔSKL][YEplac112SpMAE1]) and MY2306 (Lp4f [pRS2MDH3ΔSKL][pRS424]) when tested in shake flask fermentations in the Lp4f background, further analysis including addition of aluminum cations, alleviation of possible cellular mislocalization, altered growth conditions or strain backgrounds can be tested.

### Example 21

### Overexpression of Biotin Protein Ligase

[0352] Addition of excess biotin (550 ng/ml vs. 50 ng/ml) in the fermentation medium consistently improved malic production in shake flask assays. In order to exploit the presumably high intracellular biotin pools under these conditions, enzymes responsible for biotinylating Pyc were overexpressed.

[0353] Strains carrying an additional his3 marker were obtained by crosses of MY2308 and MY2264 with MY2243, and identifying Glu⁺Ura⁺Trp⁺His⁻ progeny. Three such isolates with the MY2308 (Lp4f) parentage (MY2520, MY2522, MY2526, MY2527, and MY2528) and one with that of MY2264 (TAM) (MY 2486) were obtained which were capable of moderate (15-25 g/L) malate production when made prototrophic with the empty vector pRS413TEF.

[0354] Primers MO5442 (5′-CACACTCTAGAAACAAAATGAATGTATTAGTCTATAATGGCCC-3′) and MO5443 (5′-CACACCTCGAGGGTAGACTCTTAACTCTGAACC-3′) were used to PGR amplify a 2.1 kb fragment (comprising the BPL1 gene which encodes biotin protein ligase) from S. cerevisiae genomic DMA. The 2.1 kb fragment was subsequently cleaved with XhoI and XbaI and ligated to XhoI-XbaI-cleaved pRS413TEF to create pMB4976. When introduced into MY2520, MY2522, MY2527, MY2528, and MY2486, no improvement of malate production in shake flask fermentation was observed under the conditions tested. Further experimentation including one or more of altering the Pyc substrate, increasing the intracellular biotin concentration, mutating the biotinylation site of the Arc1 protein (for example as described in example 26 herein), or deregulating the Bpl1 enzyme by specific alleles can be tested.

### Example 22

### Overexpression of S. cerevisiae Carbonic Anhydrase

[0355] In order to increase the flux of CO₂ [symbol] HCO₃⁻, the S. cerevisiae carbonic anhydrase (product of the NCE103 gene) was overexpressed. Primers MO5257 (5′-CACACTCTAGAATCAGAATGAGCGCTACCGAATCTTC-3′) and MO5258 (5′-CACACCTCGAGCTATTTTGGGGTAACTTTTG-3′) were used to PGR amplify a 700 bp fragment from S. cerevisiae genomic DNA. The fragment was subsequently cleaved with XhoI and XbaI, and ligated to XhoI-XbaI-cleaved pRS433TEF to create pMB4958. When introduced into MY2520, MY2522, MY2526, and MY2486, no improvement of malate production in shake flask fermentation was observed under the conditions tested. Further experimentation including including culturing NCE103 overexpressing strains under conditions of lower phi or higher intracellular CO₂ can be tested.

### Example 23

### MTH1 Variant Construction and Analysis

[0356] Both TAM and m850/Lp4f strains were obtained as strains evolved to overcome phenotypes associated with substantial elimination of PDC polypeptide activity, failure to grow on glucose minimal medium without a C2 carbon source and intolerance of high level glucose. Evolution was by extensive continuous culturing, either by chemostat or by extensive serial passages. Genetic analysis of these strains revealed that a) the TAM Glu⁺ phenotype is dominant; b) the TAM Glu⁺ phenotype segregates as a single gene in a cross; and c) the Lp4f Glu⁺ phenotype segregates as two or more genes; and d) one of the Lp4f Glu⁺-conferring alleles is tightly linked to the TAM Glu⁺-conferring allele. Since dominant mutations in the MTH1 gene have been shown to suppress the Glu⁻ phenotypes seen in several mutants, DNA was amplified from several strains with the primers MO5522 (5′-CAATAGCGAAACCACAAGCAGC-3′) and MO5523 (5′-GTCTCATCGCTAGAATATAGTGG-3′) to amplify a 848 bp 5′ fragment (from -72 to nt749) of MTH1, and the primers MO5524 (5′-CTGTAACGGGCGTCCCAAG) and MO5525 (5′CCTTGGGAATTTGGAGCTCC), to amplify a 821 bp 3′ fragment (from m. %1 to +107) of MTH1. Sequence analysis of the fragment generated with MO5524 and MO5523 from TAM, Lp4f, m850, and wild type CEN.PK revealed no polymorphisms or deviations from the published MTH1 sequence. However, the PCR fragment generated with MO5522 and MO5523 from TAM revealed a 225 bp deletion of an internal segment of the coding region, from nt169 to nt393, resulting in the in-frame deletion of aa57 to aa131. Sequence analysis of the 5′ fragment generated from Lp4f revealed a mutation at nt218 (AATGCTCCT→AATGATCCT) corresponding to a lesion at aa73 (VNAPP→VNDPP). Restriction analysis of the 5′ fragment generated from the parent of Lp4f, m850, confirmed that it also harbors the A73D allele (loss of a BsmI site; gain of a Sau3A site). A CEN.PK wild type strain was shown to carry the published MTH1 sequence throughout.

[0357] Transformation of the Glu⁻ pdc1 pdc5 strains MY2218 and MY2219 with the 5′ fragment from TAM, carrying the 225 bp deletion (denoted MTH1ΔT), resulted in the appearance of colonies on YPD that could be shown by PCR to harbor MTH1ΔT, confirming that the deletion alone is sufficient to confer the ability to grow on glucose to Pdc-defective strains.

### Example 24

### Construction and Expression of Pyc and Bpl Polypeptides

[0358] Genes encoding Pyc and Bpl from Aspergillus niger and Yarrowia lipolytica, and a gene encoding Pyc from Nocardioides sp. are synthesized as follows:

actagtaaatatgtctaatgttccagaaactaaagtagatccttcattgt
ccacaccagaggtccctagtcaaggtttacatagcagattggacaagatg
agagctgattcatccatattgggaagtatgaacaaaatattagtggcaaa
tagaggtgaaatcccaattagaatctttagaaccgcccacgagttatcta
tgcagactgttgctatctatgcacatgaggacagattgtcaatgcacaga
ttcaaggccgatgaggcttacgtaattggagacagaggaaaatatacacc
tgtccaagcatacttacaggtggacgagataatcgaaattgccaaggctc
atggtgttaacatggtacacccaggatatggtttcttgtccgaaaatagt
gagttcgcaagaaaagtcgaagaagctggaatggcctggattggtcctcc
acataacgttatagacagtgtcggtgacaaggtttcagcaagaaacttag
ctatcaagaacaatgtacctgtcgtgccaggaaccgatggtcctgttgag
gacccaaaggatgccttgaaatttgtagaaaagtacggttatcctgtcat
tataaaagcagctttcggaggtggaggtagaggtatgagagttgtgagag
agggagatgacatcgttgatgcctttaacagagcatccagtgaagctaag
actgccttcggtaatggtacatgtttcattgaaagattcttagacaaacc
aaaacatatagaggtacaattgttagcagatggacaaggtaatgtcgtgc
acttgtttgaaagagattgctctgttcagaggagacatcaaaaggtagtc
gaaatcgctccagccaaagacttacctgtcgaggtgagagatgcaatttt
ggacgatgctgttagattagctgaagatgccaagtacagaaacgcaggaa
ccgctgagttcttggtagacgagcaaaatagacactacttcattgagata
aacccaagaatccaggtcgaacatactattacagaggaaataaccggtat
cgatattgttgccgcacaaatacagattgctgccggtgcaactttagagc
aattgggattaacacaagacaaaatctcaactagaggttttgctattcag
tgtagaataaccacagaagatcctgcaaagcaattccaaccagatactgg
aaaaatcgaagtctacagatctgctggaggtaatggagtaagattggacg
gtggtaacggatttgccggtgcaattatatcccctcactatgatagtatg
ttagtcaagtgctcatgttctggcaccacattcgagatagccagaagaaa
gatgattagagccttggttgagtttagaataagaggagtcaagactaata
ttccattcttattggcattattgacacatcctacctttatcgaaggaaaa
tgctggactacattcattgacgatactccatccttatttgacttgatgac
cagtcagaacagggctcaaaagttattggcctacttagcagatttatgtg
ttaatggaacaagtataaaaggtcaggtaggtaaccctaagttaaagtct
gaggtcgttatcccagtgttgaagaactccgaaggaaagattgtagattg
tagtaaacctgacccagtcggttgagaaatatattagttgaacaaggtcc
tgaggctttcgccaaggcagtgagaaagaacgatggagttttggtaatgg
acactacctggagagatgctcatcaatcattattggctacaagagtcaga
actaccgacttattggcaattgcaaatgaaacatctcacgctatgtccgg
tgcctttgcattagagtgctggggaggtgctacttttgacgttgcaatga
gattcttgtatgaagatccatgggacagattaagaaagatgagaaaagca
gtgccaaatatcccttttcagatgttgttaagaggtgctaatggagtagc
ctactcatctttgccagataacgcaatagatcatttcgtcaagcaagcta
aagacaatggtgttgatatctttagagtgttcgacgccttaaacgatttg
gatcaattaaaggtaggtgttgacgcagtcaagaaagctggaggtgttgt
ggaagcaaccgtatgttatagtggagatatgttgaatcctaagaagaagt
acaacttagagtattacttggactttgtcgatagagttgtagaaatgggc
acccacatcttaggtattaaagatatggcaggaactttgaagccagctgc
cgcaaccaaattaataggtgctatcagagaaaagtatcctaatttgccaa
ttcatgttcatacacacgactccgccggtactggagtggcatcaatggct
gccgcagctgaggccggtgcagatgtcgttgacgtggcttctaatagtat
gtctggaatgacctcccagccttcaataagtgccttaatggcaacattgg
aaggaaaattatctactggtttggacccagctttagtaagagaattggat
gcctattgggcacaaatgagattattgtactcatgcttcgaggctgactt
aaagggacctgatccagaagtctttcaacatgaaattcctggtggtcagt
tgacaaacttattgttccaagcccagcaagttggattaggtgagcaatgg
aaagaaactaagcaggcatatatcgctgccaatcaattgttaggagacat
tgtaaaagttaccccaacatctaaggtggtcggtgatttggcacagttta
tggtttccaacaaattaagttacgacgatgtgataaaacaggctggttca
ttggattttcctggatctgtattagacttctttgagggtttgatgggtca
accatatggaggtttcccagaacctttaagaactgaagcattaagaggac
agagaaagaaattaaccgagaggcctggaaaatccttgcctccagtcgat
tttgcagctgttagaaaagacttagaagaaagattcggtcacatcacaga
gtgtgatattgccagttactgcatgtatcctaaggtatttgaagattaca
gaaagatagttgacaagtatggagatttgtcaattgtgccaactagatta
ttcttggaagcacctaaaaccgacgaggaattttctgtcgaaatcgagca
aggtaagacattaatattggctttaagagctattggtgatttgtccatgc
aaactggattaagagaagtttacttcgagttgaatggtgaaatgagaaag
atcagtgtggaagataagaaagccgcagtagaaaccgtgtcaagaccaaa
agccgaccctggaaacccaaatgaagttggtgcccctatggccggtgtag
ttgtggaagtcagagttcatgagggaacagaagtgaagaaaggtgatcca
gtagctgtcttatctgccatgaagatggaaatggttatttccgccccagt
ctcaggtaaagtaggagaggtcccagttaaggaaggtgactctgttgatg
gaagtgatttgatatgcaaaatcgtgagagcttaactcgagctagcgaag
acaaccag-3′ (Y. lipolytica Pyc)
actagtaaatatggctgcaccaagacaacctgaagaggccgttgaatgac
actgagttcattgatgaccatcacgatcagcatagagacagcgtacacac
cagattgagagctaattcagcaataatgcaattccagaaaatcttagtcg
ccaacagaggtgagattccaataagaatctttagaaccgctcatgaattg
tccttacaaactgtggcagtttatagtcacgaagatcatttgtctatgca
tagacaaaaggccgatgaggcttacatgattggaaagagaggtcagtata
cacctgtaggagcatacttagctatagacgaaatcgtcaagattgccttg
gaacacggtgtgcacttaattcacccaggttatggattcttgtcagagaa
tgcagaatttgctagaaaagttgaacaatccggtatggtattcgtcggac
ctaccccacaaactatagagagtttaggtgataaggtttctgccagacag
ttggcaatcagatgtgacgtgcctgttgtaccaggtacacctggaccagt
cgaaagatacgaggaagtgaaggcttttaccgatacttatggtttcccta
ttataatcaaggccgcatttggtggaggtggaagaggtatgagagttgta
agagatcaagctgaattaagagactcattcgagagagccacatccgaagc
aagaagtgcttttggtaacggaaccgtgttcgttgaaagattcttggata
gaccaaaacatattgaggtgcagttattgggtgacaatcacggtaacgtg
gtacacttatttgaaagagattgtagtgtgcaaaggagacatcaaaaggt
ggttgaaatagcccctgcaaaagatttgccagctgacgtaagagatagaa
tcttagctgacgccgtcaagttggcaaaatcagttaattacagaaacgct
ggaactgccgagttcttagtggatcagcaaaatagatattacttcattga
aattaacccaagaatacaagttgaacacaccatcactgaggaaattaccg
gtatagatatcgtagcagctcagattcaaatagccgcaggagctacattg
gagcagttaggtttgactcaagacagaatttccaccagaggtttcgcaat
ccaatgtagaattacaactgaagatcctagtaagggattttctccagaca
caggaaaaatagaagtctatagatcagctggtggaaatggtgttagatta
gatggaggtaatggtttcgccggagcaatcattacccctcattacgattc
tatgttggtgaaatgcacttgtagaggttccacatatgagatcgccagaa
gaaaggtagtcagagccttagttgagtttagaatcagaggtgtgaaaact
aacattccattcttgacctccttattgtcacaccctgtgtttgtggatgg
aacatgctggactaccttcatagatgacacaccagaattatttgcattgg
tcggttctcagaatagggctcaaaagttattggcctacttaggagatgtt
gcagtgaacggttccagtattaaaggtcaaatcggagagcctaagttgaa
aggtgacattataaagccagtattacatgatgctgccggtaaacctttgg
atgtctcagttccagcaactaagggatggaaacagatcttagactctgaa
ggtctgaggcttttgctagagccgtgagagcaaataagggatgtttgatt
atggataccacatggagggacgctcatcaatccttattggccactagagt
tagaaccatagacttattgaacattgcacacgagacaagtcatgctttag
ccaatgcatattcattggaatgttggggtggtgctactttcgatgtagca
atgagattcttatacgaggacccatgggatagattgagaaaattaagaaa
agcagtccctaatatcccattccaaatgttgttaagaggagctaatggtg
ttgcctattcttccttgccagacaacgcaatataccacttttgcaagcag
gctaagaagtgtggtgtggatattttcagagtatttgatgccttaaacga
cgtcgatcaattggaagttggaatcaaagcagtgcatgctgccgaaggtg
tagttgaggcaacaatttgctattcaggagatatgttaaacccttctaag
aaatacaacttgccatactacttagatttggtcgataaggttgtgcagtt
caaacctcacgtattaggtataaaggatatggctggtgtcttgaaaccac
aagccgcaagattattgatcggaagtattagagaaagataccctgacttg
cctatacatgttcatacacacgactccgctggtactggtgtagcttcaat
gattgcatgtgctcaagccggagcagatgctgttgatgccgcaaccgact
ctttgagtggtatgacatctcagcctagtatcggagctatcttagcctca
ttggaaggtactgagcatgatccaggtttaaacagtgcacaagtgagagc
tttggacacatattgggcccaattaagattgttatactctccttttgaag
caggattgactggtccagatcctgaagtctatgagcacgaaataccaggt
ggacagttaaccaacttgatcttccaggcttcacagttaggtttgggaca
acaatgggccgaaacaaagaaagcatacgagtctgctaatgacttattgg
gtgacgttgtgaaagtaactcctacctccaaggtcgttggtgacttagcc
cagtttatggtaagtaacaaattgacagcagaggacgttattgctagagc
cggagagttagattttccaggttcagtgttggagttcttagaaggtttga
tgggacaaccatatggtggatttcctgagccattaagaagtagagcattg
agagacagaagaaagttagataaaagacctggtttgtacttagaaccatt
ggacttagctaagatcaaatcccaaattagagaaaattatggtgctgcca
ctgagtacgacgtcgcaagttatgctatgtaccctaaggttttcgaagat
tataagaagtttgtggccaaattcggagacttgtcagtattaccaaccag
atacttcttggcaaagcctgaaatcggtgaggagttccatgtcgaattag
agaaaggtaaggttttgatattaaagttgttagctattggaccattgtct
gaacagacaggtcaaagagaggtgttttatgaagttaacggagaagtgag
acaggtgtccgttgatgataagaaggccagtgtggagaatactgcaagac
ctaaagctgaattaggtgactcatctcaggtgggagccccaatgtccgga
gtcgttgtagaaatcagagttcatgatggtttggaggtgaagaaaggtga
ccctattgcagtcttatcagctatgaagatggaaatggttatatctgcac
ctcacagtggaaaagtgtcctcattgttagtaaaggaaggtgattctgtc
gatggacaagacttggtttgcaaaatcgtgaaggcttaactcgagctagc
gaagacaaccag-3′ (A. niger Pyc)
actagtaaatatgttttccaaagttttggtagctaatagaggtgagattg
ccataagagccttcagagctgcatatgaattaggagccagaactgtcgct
gtctttccatacgaagatagatggtcagagcatagattgaaagccgacga
ggcttacgagatcggagaaagaggacaccctgttagagcttacttggacc
cagaagcaattgtagcagtcgccataagagccggtgccgatgcagtgtat
cctggttacggtttcttgtccgaaaacccagcattggccgaggcctgtgc
aaacgctggtatcacatttgtaggtcctaccgccgatgtattgactttaa
caggtaacaaagcaagagcaattgccgcagctaccgctgccggtgtccct
actttagcaagtgttgaaccttctactgacgtggacgccttggtggaatc
agccggagagttgccatacccattattcgtaaaggcagtggctggtggag
gtggtagaggaatgagaagagttgatgcaccaggtcaattgagagaagca
gttgagacatgtatgagagaagctgaaggtgcatttggcgaccctactgt
attcatagagcaggctgtcgttgatccaagacatatcgaagtgcaagtat
tggcagacggtgaaggtcacgtaatgcatttgtttgagagagattgttcc
gtccagaggagacaccagaaagtgattgaaatcgcccctgctccaaactt
agacccagagttgagagacagaatatgcgcagacgccgttagattcgcta
aggaaatcggatacagaaatgccggtactgtcgagttcttattggacgca
aaaggaacctatcatttcattgaaatgaatcctagaatacaagtcgagca
tacagtgactgaagaggtgacagatgtagacttagtacagagtcaattga
gaatcgcttctggtgaaaccttagccgacttgggattatcacaagaaact
gtaaccttgagaggagctgcattgcagtgtagaattactacagaggaccc
agctaacaactttagacctgacactggtgttatcacaacttacagatccc
caggaggtggaggagtgagattggatggtggtactgtgtatactggtgcc
gaagtcagtgcccactttgattctatgttagctaagttgacttgcagagg
tagaaccttcgagaaagccgttgagaaggcaagaagagctgtggccgagt
ttagaatcagaggtgtttcaacaaacattcctttcttgcaagccgtattg
gtggacccagacttttccagtggacatgttactacctctttcattgaaac
acacccacaattattgcaagccagatcatctggtgacagaggaagcagat
tgttgcattacttagccgatgtgactgtgaatcaaccacacggtcctgca
cctgtttccatcgaccctgttaccaaattgccagaggtgaacttagacgt
tcctgctccagatggtacaagacagttgttgttagatgttggaccagaag
agtttgccagaagattaagagcacaaactggtgttgctgtaaccgataca
actttcagggacgcccatcaatcattgttagctaccagagtgagaacaag
agatttgttagctgtagccggtcatgtcgcaagaactacccctcagttgt
ggtctttagaggcttggggaggtgccacatatgatgtagccttaagattc
ttagctgaggacccatgggagagattggcagccttaagacaagcagtgcc
taacatctgtttgcagatgttattgagaggaagaaatactgtaggttaca
caccttatccagccgatgttactcaagcattcgtcgaagaagctgccgca
accggtattgacgtgtttagaatatttgatgctttaaacgatgtggagca
aatgaggccagccatagaggctgtaagagctacaggaactgccgtcgcag
aagttgcattgtgttacacaggagacttatccgatcctgacgagacattg
tatactttagattactatttggaattagccgatagaattgtagacgccgg
agcacacgtcttagctataaaggatatggcaggattattgagagtgccag
ctgccagaaccttagtcacagcattgagagacagattcgacttgccagtt
catttgcacactcatgataccccaggtggacagttagctacattattggc
agccattgacgccggtgtggatgctgtagacgccgcaactgctagtatgg
caggaacaacatcacaacctccattgtctgcattagtttccgctactgat
catggacctagagaaaccggtttgagtttaggtgccgtgtcagcattgga
gccatattgggaagctacaagaagagtatacgcacctttcgagtctggat
taccttccccaactggtagagtttatagacacgaaatccctggaggtcaa
ttgtcaaacttaagacagcaagctatcgccttaggtttgggagagaaatt
cgagcaaatagaagatatgtacgcagctgccaacgacatattaggtaatg
tggtcaaggttaccccatctagtaaggtagtaggtgacttagcattgcac
ttagtcgctgttggagccgaccctacagaatttgcagatgagccaggaaa
attcgatattcctgactccgtaataggattcttaaatggagaattgggtg
acccacctggaggttggccagaacctttcagaactaaggccttagctggt
agaactcacaagcctcctgttgaggaattagacgatgaacagagagaggg
attggccggttcatctccaacaagaagaagaactttaaacgaattgttat
ttccaggtccaacaaaggagttcacagaaagtagattaagatatggtgac
acttctgtgttaccaacattggattacttatatggtttgagaagaggaga
agagcatgcagtcgaaatcgaagagggtaaaacattaatcttgggagttc
aagccataactgaacctgatgaaagaggattcagaaccgtgatgacaact
attaacggtcagttaagaccagtgagtgtcagagacagatcagttgccgc
tgaggttgctgccgcagaaaaggcagataccagtaaacctggacacgttg
cagccccatttcaaggtgtggtgtctatcgttgtggaggaaggtcaacag
gtagccgctggagacacagtagcaactatcgaagccatgaagatggaggc
ctcaataaccgcacctgttgccggaacagttgagagattggccttatctg
gtactcaagcagtagaaggaggtgatttggtcttagttttgtcctaactc
gagctagcgaagacaaccag-3′ (Nocardioides sp. Pyc)
ctggtgagacctctagaaaacatgaatgttttggtatacaacggtccagg
ttctacacctgaatcagtcaaacatgctacagagtccttaagaaagttgt
taagtccatactattctgtgcacaatgttgatgcagaagtaattaagaac
gagccttggaccgaatcaactgccttgttagtcatgccaggtggagctga
cttgccttactgttccgacttaggtggtccaggaaataagttgataagaa
actggatcagagccggtggaaaatacttaggattttgcgccggtggatac
tatggtgctcaaagagtggagttcgaggaaggtacagacttggaagttat
tggagatagagagttaagtttgtacggtggaaagtgtgtaggttctgcat
ataaaggttttgtctacgactcacatgccggagctagagcagttggtgtg
aattggaagggttcccctttcaaatgctactttaacggaggtggagtttt
cgtaccaggtaaggatatggataccgaaaatactgaagtcgtggctgagt
acagtcaggacacagaagttcctaactctggtagatcagccgtagtcaaa
atgaatgttggagagggtagagcagtgttatccggtatacacccagagtt
taacccatccatgatgaagaaaggagatcaacatatcgacgctgttattg
aagagttggaaaacttcgaaaaggagagattagccttcttgagacactta
atgaccttgttaggtttgaaaactaatccagatacaaccgatatgacttt
aacatctttgtatgtaactggaaacggtgtcgcaaaattattgaaggact
tagatgtgtcagaagaaaatagagttttctctgctcctaacgacaccttc
ttctttggtgagaaaccatccggagatagtaatcatacacatgtaatacc
aatggtcggtgatgttcctgcctcagaattgactccacactttgaccata
agttatactatcagtctttgagagcacctgaattaggatcaactttgtta
tacggagaggtgttgacaagtacttcaacattattggataagaactacaa
cttattgagacacttaccaaacggtttcaccgctgttggaacggtacaat
tgtctggtagaggtagaggaaataatgtctgggttaaccctatcggtgtg
ttagccgtatccacagtcttgagaattaactttaacccattcggtcaaaa
tacgagtattatatttgttcagtacttagcatcattggctatggtgcaag
caatcaagaactatggacctggttattctgaagttccagtgaaattaaag
tggcctaatgacatctacgcagctaacccaggctccgagatggtcggtag
taccgatgcttatttgaaaataggtggagttatcgtgaactctaacgtat
tcgatggtcaatacatgttagtcgttggttgtggagtgaatgttacaaat
agtgcccctactacctccttgaacatgttaattaattcaatgaacgaaaa
gaatggtacaactttggaacattatagaaccgaggtattattggcaaaat
tcttagaaacattcgaagctatgatggacgcctttaagaaccacggattc
tctatatttgagccattgtactatagttcttggttacatcaggatgcaca
agtcagattggaacattacggtaatgttaaagctactgtgaaaggtatct
ccatggaccagggaatgttattggtacaagaagagggttcaggtagagtc
attgaattacaacctgatggaaacagttttgatatgatgagaggtttgtt
aaagagaaaagagtaagtcgacggtctcagtcg-3′ (Y.
lipolytica Bpl)
ctggtgagacctctagaaaacatggctactccaaatatgacaggtaagaa
ggttaacgtattggtctattctggagcacctttatcaccattgctgcctg
cccaacatcagagatacccatccttgtgtacccaaagaattataagaaat
ggtactacagtggaaagtgttagacacaccttatattctttgagaagatt
attggctcctcattacgcagtaatcccagtcacttcagatgccttattgc
acgagccttggacagctacgtgcgcattattggtgattccaggaggtgcc
gacttaggttatggaagagttttgaacggaccaggtaatagaagaataga
acagtttgtgaaaagaggtggtgcttacttaggattctgtgccggtggtt
attacggctcccaaagatgcgagtttgaagtcggtgataagactttgcaa
gttatcggagaaagagagttagctttctatccaggtacatgtagaggtgg
agcctttgccggtttcgtgtaccatagtgaagctggtgccagagcagctg
aaatttctgttaacaaagacatattgaatgccggaatcgtacctgagaga
ttcagatgctattacaacggtggaggtgtgttcgtggatgcaccaacctt
agctgacaagggtgttgaagtattggcctcatttgaagaggaattaaacg
tggacccaggtgagggtaaagcagctgttgtgttttgcagagttggtgaa
ggaagagtagtcttgactggtccacacccagaatttgccgcagctaactt
agataagaaagctggaggtcctgagtatacaaaggtgattgaagccttgg
aagcagacgataaagctagaactgacttcttaaaggcctgtttggtgaaa
ttaggtttgcaagtaacccaatccacaactaccgtcccaagtttatcttc
attgcacttatccagtcaagagcccgcagaaacagctgatttggttgcct
cttggcaggaaatcatcaccaaagatggaaatgaggaaatcattaaagac
gaaaatgatacctttagaatagagaggccaggtgcatggaacttatcaca
attggaggactctttacctgagtccagtcagtcaaccgaaggtatcgtgg
attacaatgctattgttaaaagattggtagtccatgatgacgttccatct
tccaagttaactccttactttaatcaccatgcattctacagtaatttgca
ccaatatcaatcacagagcagagaaggagcttccgagtttggtgcccact
tagtgtacggagaagtagtcacaagtactaacaccatattggaaaagaat
ccaaagttattgagaaaattacctaacggtttcacagcatcagctactac
ccaagttgccggtagaggaagaggttctaacgtgtgggtttccccagccg
gtgctttgatcttttcaacagtattaagacaccctttggagaagattcaa
tctgccccagtcgttttcattcagtacttagcagctatggccgtggtaca
aggaatcaagaactatgatgccggttacagtgaattgcctgtcaagttaa
agtggccaaatgacgtttatgctttggacccagaacatcctgagaagaaa
cagtactccaagatctgcggaatcttagtgaactcacattattgtgctaa
cgaatacatatctgttgtaggtatcggtattaatgccactaacgcaagtc
caaccacatctttgactgctttagccgcaagattcttgggacctagagct
gccccaataaccttagagaaattgttagcaagaattttgacaactttcga
agaattatacaccagattcttgagatccggtttcgatagatcatttgagg
aaatgtactatgctgactggttacacatgcatcaagtcgttacattggaa
gaggaaggtggagtgagagccagaatcaaaggtattactagagattacgg
attattgttagcagaagagttgggttggaatgacagacctaccggtagag
tatggcaattacagagtgattctaactcatttgatttctttagaggattg
gtcagaagaaaggtttaagtcgacggtctcagtcg-3′ (A. niger
Bpl)

[0359] Plasmids harboring the Pyc-encoding genes are constructed by treating the synthetic DNA with SpeI and XhoI and ligating to XbaI-XhoI-cleaved pRS426TEF, pRS426ADH1, or pRS426TDH3. These are introduced into strains in which overexpressed Mdh-encoding constructs have been integrated at the can1 locus, and which also express OAT_{Mal}.

[0360] Plasmids harboring the Bpl-encoding genes are constructed by treating the synthetic DNA with XbaI and SalI and ligating to XbaI-XhoI-cleaved pRS413TEF, pRS413ADH1, or pRS413TDH3. These are introduced into his3 strains as described in Example 21 herein for S. cerevisiae BPL1.

[0361] In order to co-express these Pyc- and Bpl-encoding genes with one another in various combinations, the PYC2 promoter present in pRS2MDH3ΔSKL is replaced with the TPI1 promoter by amplifying a 450 bp fragment from S. cerevisiae DNA with MO5314 (5′-CACACCTGCAGCCGCGGGATTTAAACTGTGAGGAC) and MO5315 (5′-CTCTCACTAGTTTATGTATGTGTTTTTTGTAGTTATAG), and cleaving it with PstI and SpeI; amplifying pRS2MDH3ΔSKL DNA with MO5316 (5′-CACAGACTAGTAAAATATGAGCAGTAGCAAGAAATTG) and MO5317 (5′-GACGTTCCCATGGATCCTCAT), and cleaving the resultant 1.8 kb fragment with BamHI and SpeI; and ligating both fragments to PstI- and BamHI-cleaved pRS2MDH3ΔSKL to yield pMB4972.

[0362] In addition, a sequence corresponding to PYC2/CYC1 hybrid terminator for convergently transcribed genes is synthesized;

5′-ggtctcaccagtttttactcgttaattatattttatgacatctgaaa
atactagctgtactatatatggcgtatattttatctagttatgttcccat
gtatatttaaatgccaaatagaaagtaatcaaacactttcgatgaaatac
gtgctaactgtgtttcttccttaatgctttcacttaccatgtctccattc
tccattttcttcttgagtgaaaatgtgagtttataacgctcaagtacgtt
aactactctatttaatatcgtacgggatttttgatcgactgtaggttttc
ttcttagaccattccagcggccgcaaattaaagccttcgagcgtcccaaa
accttctcaagcaaggttttcagtataatgttacatgcgtacacgcgtct
gtacagaaaaaaaagaaaaatttgaaatataaataacgttcttaatacta
acataactataaaaaaataaatagggacctagacttcaggttgtctaact
ccttccttttcggttagagcggatgtggggggagggcgtgaatgtaagcg
tgacataactaattacatgactcgactgagacc-3′ (PYC2/CYC1
terminator)

[0363] Any combination of synthetic. Pyc/Bpl encoding genes may be made by linearizing any pUC19-based plasmid harboring a Pyc-encoding gene with BbsI, and inserting compatible BsaI fragments from the terminator sequence and from either Bpl-encoding gene. The PYC-term-BPL cassette may then be moved to XbaI- and SpeI-treated pMB4972 as XbaI-SpeI fragment in either orientation. The resultant plasmids can be introduced into strains expressing OAT_{Mul} and Mdh as described in other examples herein.

### Example 25

### Expression of Heterologous Phosphoenolpyruvate Carboxylase (Ppc) Peptides

[0364] The gene encoding Ppc is amplified from Erwinia chrysanthemi and is used in a manner similar to that described for PEPck in example 19 herein, to supplement or replace the PYC2 gene resident in pRS2MDH3ΔSKL. MO3764 (5′-ATGAATGAACAATATTCCGCCA-3′) and MO3765 (5′-TTAGCCGGTATTGCGCATCC-3) were used to amplify a 2.6 kb fragment that was subsequently ligated to SmaI-cleaved pBluescriptIISK to create pMB4077. This plasmid may be cleaved with PstI and BamHI, the ends made blunt with the Klenow enzyme, and ligated to the URA3 vectors (likewise made blunt, for example by cutting with XbaI and XhoI and made blunt with Klenow) outlined for PEPck in example 19 herein. The resultant expression cassettes may be moved as SacI-XhoI blunted fragments to pRS2MDH3ΔSKL as described for PEPck in example 19 herein.

[0365] The resultant plasmids are used in place of pRS2MDH3ΔSKL in the Pdc⁻ strains described above containing YEplac112SpMAE1, and assayed for malic production. Alternatively, they may be used in pyk1 or pyk1 pyk2 strains deficient in pyruvate kinase activity in conjunction with YEplac112SpMAE1.

### Example 26

### Additional Strategies to Increase Malic Acid Production

[0366] Several enzymatic and transport activities present in yeast cells have the potential to reduce malic production: the permease encoded by JEN1, which possibly mediates, the unwanted export of pyruvate; phosphoenolpyruvate carboxykinase (PCK1 gene product) and the malic enzyme (MAE1 gene product), which can reverse Pyc-mediated carboxylation; fumarase (FUM1 gene product), which can catalyze the dehydration of malate to produce fumarate; and RTG3, which positively regulates TCA enzyme genes mat operate in the oxidative direction and as an aggregate deplete oxaloacetate pools.

[0367] These genes may be deleted, using PGR amplification of DNA from the appropriate strain in the yeast deletion set (American Type Culture Collection (ATCC) Catalog #GSA-4 (MATa haploid); GSA-5 (MATalpha haploid); GSA-6 (heterozygous diploid)), each of which contain a G418^{R} cassette replacing the coding region of the gene in question. Primers are chosen from a region approximately 500 bp upstream and 500 bp downstream of the gene in question, a 2.5 kb-geneΔ::G418^{R} fragment is amplified and used to transform any of the above strains to resistance to 100 mg/L G418. These strains, when harboring the appropriate Pyc/Mdh and OAT_{Mal} expression plasmids, may be tested for malate production in shake flask fermentations.

[0368] In another approach, a mutation in FUM1 can be engineered that prevents the appearance of fumarase in the cytosol, but permits its expression in mitochondria.

[0369] In order to increase biotinylation of Pyc, the biotinylation site of Arc1, a known biotinylated protein and potential substrate competitor for or regulator of biotin protein ligase enzymes, is mutated. Primers MO5663 (5′-CACACCGTCTCTCTAGACGCCTCTAGCTTGACGC-3′) and MO5664 (5′-CACACCGTCTCACTCTGGAGCTTGCCACTAAATCCTTAATC-3′); and MO5665 (5′-CACACCGTCTCAAGAGATGTCAAGTCAACTTATACCACAT-3′) and MO5666 (5′-CACACCGTCTCGGTACCATTTGCAATTGGGTAGG-3′); are used to amplify portions of the ARC1 gene (0.97 and 1.2 kb, respectively), that upon digestion with BsmBI and ligation together into Acc65I- and Xba-cleaved pRS406, yields a construct containing the ARC1-K86R allele, abolishing biotinylation of the encoded Arc1 protein. Digestion of the resulting plasmid with BsrGI or BglII targets integration to the ARC1 locus, and excisants selected, on 5-fluoroorotic acid include ura3⁻ strains harboring an ARC1-K69R allele. The manipulation is performed in a variety of malate production hosts, and such strains, when harboring the appropriate Pyc/Mdh and OAT_{Mal} expression plasmids, are tested for malate production in shake flask fermentations.

[0370] Succinate and fumarate production: in order to convert malate to fumarate, a plasmid overexpressing the cytosolic form of Fum1 is constructed. The printers FumF (CACACTCTAGAAACAAAATGAACTCCTCGTTCAGAACTG) and FumR (CACACCTCGAGCTCGTTTATTTAGGACCTAGC) amplify a 1.4 kb FUM1Δss fragment that is missing the sequences (nucleotides 1-69) that encode a mitochondrial targeting signal. The fragment is cleaved with XbaI and XhoI and ligated to XbaI-XhoI-cleaved pRS413TEF or pRS413TDB3. The resultant plasmids are introduced into the his3 hosts described for BPL1 and NCE103 in other examples herein, which also contain Pyc- and Mdh-expressing plasmids, as well as the appropriate OAT_{Fum} expression cassette.

[0371] In order to convert malate to succinate, a strain containing or lacking the FUM1Δss expression construct is further modified by the introduction of a plasmid overexpressing one of the two genes (FRDS1) that encode fumarate reductase. The primers FrdsF (5′-CACACTCTAGAAACAAAATGTCTCTCTCTCCCGTTGTTG-3′) and FrdsR (5′-CACACCTCGAGCGTTACTTGCGGTCATTGGCAATAG-3′) amplify a 1.4 kb FRDS1 fragment mat is cleaved with XbaI and XhoI and ligated to XbaI-XhoI-cleaved pRS413TEF or pRS413TDH3. The resultant plasmids are introduced into the his3 hosts described for BPL1 and NCE103 in other examples herein, which also contain Pyc- and Mdh-expressing plasmids, as well as the appropriate OAT_{Suc} expression cassette.

[0372] If the expression of both FUMIΔss and FRDS1 is desirable, any of the expression cassettes described above may be excised with SacI and XhoI, made blunt with T4 DNA polymerase, and ligated to pRS2MDH3ΔSKL treated with MluI and the Klenow enzyme. This permits the construction of a strain bearing three plasmids: Pyc-Mdh-Frds (URA3), Fum (HIS3), and OAT_{Suc} (TRP1); or Pyc-Mdh-Fum (URA3), Frds (HIS3), and OAT_{Suc} (TRP1).

### Example 27

### Expression of an Acid Transporter to Increase C4 Acid Production

[0373] Production of organic acids, e.g., malic acid can be increased in a fungal cells by modifying the fungal cell to express a protein (e.g., a dicarboxylic acid transporter or exporter/importer) that allows export of an organic acid such a as C4 organic acid. This permits export of organic acids that might otherwise suppress additional organic acid synthesis.

[0374] A sequence encoding a putative dicarboxylic acid transporter front Aspergillus oryzae (GenBank Accession No. XP_{—}001820881; DCAT) was synthesized. The sequence used, optimized for S. cerevisiae codon bias, follows.

TTCTAGAAACAAAATGTTTAATAACGAGCATCATATACCTCCTGGATCTA
GCCACTCGGATATTGAAATGTTAACTCCTCCTAAATTTGAAGATGAAAAA
CAACTTGGACCTGTCGGTATAAGAGAAAGACTTAGACACTTTACTTGGGC
TTGGTATACACTAACTATGAGTGGGGGCGGCTTAGCTGTTTTAATAATTT
CACAACCTTTTGGTTTCAGAGGTCTTAGGGAAATCGGAATCGCTGTTTAT
ATTCTAAATCTTATACTTTTTGCTTTAGTTTGTTCCACTATGGCTATTAG
GTTTATACTACATGGTAATTTATTAGAAAGTTTGCGTCATGATAGAGAAG
GTTTGTTCTTTCCCACATTCTGGCTTTCAGTTGCAACAATTATATGTGGT
TTATCAAGGTATTTCGGTGAAGAATCAAATGAAAGTTTTCAGCTAGCTTT
AGAAGCTCTGTTCTGGATTTATTGCGTTTGTACACTATTAGTAGCTATTA
TACAATATTCATTCGTTTTCTCCTCTCATAAATATGGTCTACAAACTATG
ATGCCATCTTGGATACTACCAGCTTTTCCTATAATGTTGTCAGGTACTAT
TGCGTCTGTTATTGGCGAGCAACAACCAGCTAGAGCAGCTTTACCTATAA
TCGGAGCAGGTGTAACTTTTCAAGGATTAGGTTTTTCAATTTCTTTTATG
ATGTATGCACACTATATTGGTCGTCTAATGGAATCTGGTTTACCACACTC
AGATCATAGACCTGGTATGTTTATATGTGTTGGTCCACCGGCCTTTACAG
CACTAGCCTTAGTCGGTATGTCTAAGGGTTTGCCTGAAGATTTTAAGTTA
TTACATGATGCACACGCCCTGGAAGATGGAAGAATTATAGAACTATTAGC
AATCTCTGCAGGTGTTTTCTTATGGGCTTTAAGTTTATGGTTTTTTTGTA
TTGCAATTGTCGCCGTTATCAGATCACCTCCCAAAGCCTTTCATTTAAAC
TGGTGGGCTATGGTTTTCCCAAACACTGGTTTCACTTTAGCAACAATAAC
CCTAGGTAAAGCATTAAACTCTAACGGTGTAAAAGGTGTTGGTTCAGCTA
TGAGTATTTGTATTGTATGTATGTATATATTCGTTTTCGTAAATAATGTT
AGAGCTGTGATACGTAAAGATATAATGTACCCTGGTAAAGACGAAGATGT
CTCTGATTAGTCTTCTCGAG

[0375] The amino acid sequence of the encoded transporter follows (GenBank ______).

MFNNEHHIPPGSSHSDIEMLTPPKFEDEKQLGPVGIRERLRHFTWAWYTL
TMSGGGLAVLIISQPFGFRGLREIGIAVYILNLILFALVCSTMAIRFILH
GNLLESLRHDREGLFFPTFWLSVATIICGLSRYFGEESNESFQLALEALF
WIYCVCTLLVAIIQYSFVFSSHKYGLQTMMPSWILPAFPIMLSGTIASVI
GEQQPARAALPIIGAGVTFQGLGFSISFMMYAHYIGRLMESGLPHSDHRP
GMFICVGPPAFTALALVGMSKGLPEDFKLLHDAHALEDGRIIELLAISAG
VFLWALSLWFFCIAIVAVIRSPPKAFHLNWWAMVFPNTGFTLATITLGKA
LNSNGVKGVGSAMSICIVCMYIFVFVNNVRAVIRKDIMYPGKDEDVSD

[0376] The transporter-encoding nucleic fragment was liberated from its vector using XbaI and XhoI, and ligated to XbaI-XhoI-cleaved pRS416GPD to create pMB5210 (CEN URA3). The TDH3p-DCAT1-CYC1t cassette was moved to pRS404 using KpnI and SacI to create pMB5238 (integrating TRP1). Spontaneous Trp⁻ revertants were obtained from MY2888 and MY2907 as fluoro-anthranilate-resistant clones, and MY3229 (Pyc⁻) and MY3230 (Pyc⁺) were identified as having simultaneously lost TRP1 and TDH3-Spmae1 by homologous excision. Next, pMB5238 was used to transform MY3230 to prototrophy (via integration at the trp1 locus), creating MY3523, MY3524, and MY3525. Alternatively, pMB5238 was used to transform MY3229 to tryptophan, prototrophy (via integration at one of two resident CYC1 terminators), creating MY3300, which was subsequently transformed to uracil, prototrophy with pMB5165 (directed to integrate at the pyc2 locus), creating MY3522. These four Pyc⁺ Dcat⁺ strains are predicted to be virtually genetically identical, and they behave similarly in fermentations. On average the four strains were capable of producing greater than 16 g/L malic acid in 96 hr when cultured with 100 g/L glucose and 0.5% CaCO₃. In comparison, strain MY2907, containing the S. pombe maeI transporter instead of DCATI, typically produces 12 to 15 g/L malic acid under these poorly buffered conditions (final pH<3).

[0377] Additional useful organic acid transporters are listed in FIGS. 35 and 62.

### Example 28

### Production of Malic Acid in Low pH Cultures

[0378] Fungal strains used for production of malic acid are generally culture at around pH 4.5. However, maintaining this pH during malic acid production can require the use of significant quantities of CaSO₄, which can be costly both in terms of cost of materials and disposal of waste products. Thus, the ability to produce malic acid in lower pH cultures (e.g., pH 2.5) would have significant benefits with respect to the economics and environmental impact of the downstream processing and purification steps. For instance, a hundred-fold reduction in the amount of CaSO₄ would be possible if the final pH could be reduced front pH 4.5 to pH 2.5.

[0379] Reduced buffering and/or low pH culturing is difficult during the production of malic acid because the production of pyruvate by pdc1 pdc5 strains leads, at low pH, to the generation of protonated pyruvic acid, which is toxic. To address this issue, a pyc1 pyc2 strain, MY2888, whose malic production could be increased upon introduction of a Pyc-encoding plasmid, whose flux to ethanol is reduced but not eliminated, and which secretes undetectable levels of pyruvate. Described below are strains derived from MY2888 which produce high levels of malic acid even when cultured at low pH.

[0380] TAM was cured of an episomal URA3 plasmid, rendered trp1ΔhisG using a hisGURA3-hisG cassette, and a TDH3p-MDH3ΔSKL cassette was integrated at the can1 locus by URA3-mediated integration and excision to create MY2421. Subsequent integration of a TDH3p-Spmae1 TRP1 plasmid (pMB4957) at the same locus yielded MY2542.

[0381] A pyc1 pyc2 strain (CMJ238) of the W303 background was obtained, from Carlos Ganeedo (University of Madrid). After HO-mediated mating type switching to MATα to create MY2682, this strain was mated to MY2542, sporulated, and a glucose-ammonia-negative antimycin-sensitive spore was identified, MY2888. Its genotype was determined to be pyc 1 pyc 2 PDC1 pdc5 PDC6 can1::TDH3p-MDH3ΔSKL::TKP::TDH3p-Spmae1 MTH1ΔT. Introduction of TDH3p-PYC2 in a single copy at the pyc2 locus (pMB5165) of MY2888 results in a strain, MY2907, capable of substantial malic production (see Table below). Introduction of multiple episomal copies of TDH3p-YIPYC (pMB5094) into MY2888 results in a strain, MY2928, with even higher productivity (Table XX). Moreover, the lack of pyruvate secretion allows for the malic production under poorly buffered conditions (Table-XX, Column 4).

Typical malic acid productivity in shake flasks (g/L)

| | 100 g/L Glu | 200 g/L Glu | 100 g/L Glu |
|---|---|---|---|
| Strain | 50 g/L CaCO₃ | 100 g/L CaCO₃ | Ca-MES 20% CO₂ |
| MY2907 | >55 | >100 | ~20 |
| MY2928 | >65 | ~140 | ~30 |
| final pH | ~5 | ~5 | ~2.5 |

Media conditions with CaCO₃ were according to Verduyn, lacking ammonium sulfate and containing 1 g/L urea. In the third column, the same medium was used with 13 mM CA-MES (2 mM Ca⁺⁺) pH 5.7 in a 20% CO₂ atmosphere.

[0382] Plasmid pMB5165 (TDH3p-PYC2 URA3) was prepared as follows. Oligo MO5316 (CACACACTagtaaaatatgagcagtagcaagaaattg) was used to insert a SpeI site upstream of the PYC2 open reading frame in pRS2MDH3ΔSKL by PCR amplification (pMB4972; also contains the TPI1 promoter in place of native PYC2 promoter). A fragment comprising the PYC2 open reading frame and the PYC2 terminator was subsequently ligated as a 3.5 kb SpeI-BsiWI fragment to SpeI-Acc65I-cleaved pRS414GPD to create pMB5099. The TDH3p-PYC2 cassette was then moved as a BglI fragment to BglI-cleaved pRS406 to create pMB5165.

[0383] Plasmid pMB5094 (TDH3p-YIPYC URA3 2m) was prepared as follows. A nucleic acid molecule having the sequence below, encoding the Y. lipolytica pyruvate carboxylase using S. cerevisiae codon bias, was synthesized:

acagtaaatatgtctaatgttccagaaactaaagtagatccttcattgtc
cacaccagaggtccctagtcaaggtttacatagcagattggacaagatga
gagctgattcatccatattgggaagtatgaacaaaatattagtggcaaat
agaggtgaaatcccaattagaatctttagaaccgcccacgagttatctat
gcagactgttgctatctatgcacatgaggacagattgtcaatgcacagat
tcaaggccgatgaggcttacgtaattggagacagaggaaaatatacacct
gtccaagcatcttacaggtggacgagataatcgaaattgccaaggctcat
ggtgttaacatggtacacccaggatatggtttcttgtccgaaaatagtga
gttcgcaagaaaagtcgaagaagctggaatggcctggattggtcctccac
ataacgttatagacagtgtcggtgacaaggtttcagcaagaaacttagct
atcaagaacaatgtacctgtcgtgccaggaaccgatggtcctgttgagga
cccaaaggatgccttgaaatttgtagaaaagtacggttatcctgtcatta
taaaagcagctttcggaggtggaggtagaggtatgagagttgtgagagag
ggagatgacatcgttgatgcctttaacagagcatccagtgaagctaagac
tgccttcggtaatggtacatgtttcattgaaagattcttagacaaaccaa
aacatatagaggtacaattgttagcagatggacaaggtaatgtcgtgcac
ttgtttgaaagagattgctctgttcagaggagacatcaaaaggtagtcga
aatcgctccagccaaagacttacctgtcgaggtgagagatgcaattttgg
acgatgctgttagattagctgaagatgccaagtacagaaacgcaggaacc
gctgagttcttggtagacgagcaaaatagacactacttcattgagataaa
cccaagaatccaggtcgaacatactattacagaggaaataaccggtatcg
atattgttgccgcacaaatacagattgctgccggtgcaactttagagcaa
ttgggattaacacaagacaaaatctcaactagaggttttgctattcagtg
tagaataaccacagaagatcctgcaaagcaattccaaccagatactggaa
aaatcgaagtctacagatctgctggaggtaatggagtaagattggacggt
ggtaacggatttgccggtgcaattatatcccctcactatgatagtatgtt
agtcaagtgctcatgttctggcaccacattcgagatagccagaagaaaga
tgattagagccttggttgagtttagaataagaggagtcaagactaatatt
ccattcttattggcattattgacacatcctacctttatcgaaggaaaatg
ctggactacattcattgacgatactccatccttatttgacttgatgacca
gtcagaacagggctcaaaagttattggcctacttagcagatttatgtgtt
aatggaacaagtataaaaggtcaggtaggtaaccctaagttaaagtctga
ggtcgttatcccagtgttgaagaactccgaaggaaagattgtagattgta
gtaaacctgacccagtcggttggagaaatatattagttgaacaaggtcct
gaggctttcgccaaggcagtgagaaagaacgatggagttttggtaatgga
cactacctggagagatgctcatcaatcattattggctacaagagtcagaa
ctaccgacttattggcaattgcaaatgaaacatctcacgctatgtccggt
gcctttgcattagagtgctggggaggtgctacttttgacgttgcaatgag
attcttgtatgaagatccatgggacagattaagaaagatgagaaaagcag
tgccaaatatcccttttcagatgttgttaagaggtgctaatggagtagcc
tactcatctttgccagataacgcaatagatcatttcgtcaagcaagctaa
agacaatggtgttgatatctttagagtgttcgacgccttaaacgatttgg
atcaattaaaggtaggtgttgacgcagtcaagaaagctggaggtgttgtg
gaagcaaccgtatgttatagtggagatatgttgaatcctaagaagaagta
caacttagagtattacttggactttgtcgatagagttgtagaaatgggca
cccacatcttaggtattaaagatatggcaggaactttgaagccagctgcc
gcaaccaaattaataggtgctatcagagaaaagtatcctaatttgccaat
tcatgttcatacacacgactccgccggtactggagtggcatcaatggctg
ccgcagctgaggccggtgcagatgtcgttgacgtggcttctaatagtatg
tctggaatgacctcccagccttcaataagtgccttaatggcaacattgga
aggaaaattatctactggtttggacccagctttagtaagagaattggatg
cctattgggcacaaatgagattattgtactcatgcttcgaggctgactta
aagggacctgatccagaagtctttcaacatgaaattcctggtggtcagtt
gacaaacttattgttccaagcccagcaagttggattaggtgagcaatgga
aagaaactaagcaggcatatatcgctgccaatcaattgttaggagacatt
gtaaaagttaccccaacatctaaggtggtcggtgatttggcacagtttat
ggtttccaacaaattaagttacgacgatgtgataaaacaggctggttcat
tggattttcctggatctgtattagacttctttgagggtttgatgggtcaa
ccatatggaggtttcccagaacctttaagaactgaagcattaagaggaca
gagaaagaaattaaccgagaggcctggaaaatccttgcctccagtcgatt
ttgcagctgttagaaaagacttagaagaaagattcggtcacatcacagag
tgtgatattgccagttactgcatgtatcctaaggtatttgaagattacag
aaagatagttgacaagtatggagatttgtcaattgtgccaactagattat
tcttggaagcacctaaaaccgacgaggaattttctgtcgaaatcgagcaa
ggtaagacattaatattggctttaagagctattggtgatttgtccatgca
aactggattaagagaagtttacttcgagttgaatggtgaaatgagaaaga
tcagtgtggaagataagaaagccgcagtagaaaccgtgtcaagaccaaaa
gccgaccctggaaacccaaatgaagttggtgcccctatggccggtgtagt
tgtggaagtcagagttcatgagggaacagaagtgaagaaaggtgatccag
tagctgtcttatctgccatgaagatggaaatggttatttccgccccagtc
tcaggtaaagtaggagaggtcccagttaaggaaggtgactctgttgatgg
aagtgatttgatatgcaaaatcgtgagagcttaactcgag

[0384] This sequence was moved as a SpeI-XhoI fragment to SpeI-XhoI-cleaved pRS426GPD to create pMB5094.

[0385] Plasmid pMB4957 (TDH3p-Spmae1 TRP1) was prepared as follows. The KpnI-SacI fragment comprising TDH3p-Spmae1 from YEplac112SpMAE1 was ligated to KpnI-SacI cleaved pRS404 to create pMB4957.

[0386] All of the compositions and methods disclosed and claimed herein cars be made and executed without undue experimentation in light of the present disclosure. While the compositions and methods of this invention have been described in terms of preferred embodiments, it will be apparent to those of skill in the art that variations may be applied to the compositions and methods and in the steps or in the sequence of steps of the method described herein without departing from the concept, spirit and scope of the invention. More specifically, it will be apparent that certain agents which are both chemically and physiologically related may be substituted for the agents described herein while the same or similar results would be achieved. All such similar substitutes and modifications apparent to those skilled in the art are deemed to be within the spirit, scope and concept of the invention as defined by the appended claims.

The application's sequence listing, which the Patent Office published only in electronic form, follows.

SEQUENCE LISTING (229 sequences)

SEQ ID NO: 1-8 - skipped (8 entries)

SEQ ID NO: 9 - protein, 334 aa, Saccharomyces cerevisiae
MLSRVAKRAFSSTVANPYKVTVLGAGGGIGQPLSLLLKLNHKVTDLRLYDLKGAKGVATDLSHIPTNSVVKGFTPEEPDGLNNALKDTDMVLIPAGVPRKPGMTRDDLFAINASIVRDLAAATAESAPNAAILVISNPVNSTVPIVAQVLKNKGVYNPKKLFGVTTLDSIRAARFISEVENTDPTQERVNVIGGHSGITIIPLISQTNHKLMSDDKRHELIHRIQFGGDEVVKAKNGAGSATLSMAHAGAKFANAVLSGFKGERDVIEPSFVDSPLFKSEGIEFFASPVTLGPDGIEKIHPIGELSSEEEEMLQKCKETLKKNIEKGVNFVASK

SEQ ID NO: 10 - DNA, 1844 bp, Saccharomyces cerevisiae
tgattacgctaataacactacataagaaacatagataaattataattcactaatacaaaatccctcaatttaattaatcaatttcttattcaacaactagagtaggcactagcagtttgtgcgaccctcggcgccggagaggtacaagggacctggcggttgggccttcctgccagcttctcccccccttctcggcattcactcagcgttcattggctcaatcacgcgccaagcggattcccagaaaaatacaaaaaaaagttgccataatacaatggcggatattacaatatatatagcttgcgctttaaaaagaagtgttagcacgcattgggtgtttgtactgtattcctccacttaagataacgaatacacatatagatatacaatatattatacgtggacatctacggaaaggaagaaaaaaaacaaaaggaaaaggaaggataccatatacaatgttgtcaagagtagctaaacgtgcgttttcctctacagttgccaacccttataaagtgactgttttgggtgcaggcggtggtattggacaaccattgtctttgcttctaaagcttaaccataaagtcacggacttaagactgtacgacctaaagggcgcaaaaggtgttgccaccgatttgtctcatattccaacaaactccgtggtcaaggggtttactccagaagagccagacggattgaacaacgctttaaaggacacagacatggttttaattcctgctggtgtgcccagaaagcctggtatgacacgtgatgacttgttcgccatcaacgcaagcatcgttcgcgatttggcagcagcaaccgccgaatccgctcccaatgctgccattctggtcatttccaacccagtcaattctaccgttccaattgtcgcccaagtcttgaaaaacaagggtgtttacaacccaaagaaattgttcggtgtgactaccttggactctattagagccgccagattcatctcagaagtcgagaacaccgatccaactcaggaaagggttaacgtcatcggtggacattctggtattaccatcatcccattgatttcgcaaacaaaccataagttgatgtctgatgacaagagacacgaattgattcacagaatacagtttggtggtgacgaagtcgtcaaagcaaagaatggtgctggctctgctacgttgtcaatggcccatgctggtgctaaattcgctaacgctgttttgtccggtttcaaaggcgaaagagacgtcatcgagccttccttcgtggactctcccttgttcaaatccgaaggcatcgaattctttgcatctccggtcactttgggcccagatggtattgaaaagatccatccaataggtgagttatcttcagaagaagaagaaatgctacaaaaatgtaaagaaaccttgaagaagaatatcgaaaagggtgtcaactttgttgctagtaaatagattgttcaagatcagaaatagagtgaaaaatagggaaaaaaaaaaaaaaattctactaataagaacggaagactactcgccatcatgagattacgacatcttttttatttaattctttgttatatttagccaattgaaaggaaggaaactgccaaaaatcaactagagaaaaattcatgctattcgttgctcctacacctttttttcttccgtagacgaggaaaaacaaaaatgattaaataggcgcgcgcggtgtgatggtgatgataatgatgatgatgatgataatgatgaataaacgtttcggtttacgagtttctttaaatatacatatatgatataaaaaaaaaaatacgtaccacttacaatttgcaaatatag

SEQ ID NO: 11 - protein, 377 aa, Saccharomyces cerevisiae
MPHSVTPSIEQDSLKIAILGAAGGIGQSLSLLLKAQLQYQLKESNRSVTHIHLALYDVNQEAINGVTADLSHIDTPISVSSHSPAGGIENCLHNASIVVIPAGVPRKPGMTRDDLFNVNAGIISQLGDSIAECCDLSKVFVLVISNPVNSLVPVMVSNILKNHPQSRNSGIERRIMGVTKLDIVRASTFLREINIESGLTPRVNSMPDVPVIGGHSGETIIPLFSQSNFLSRLNEDQLKYLIHRVQYGGDEVVKAKNGKGSATLSMAHAGYKCVVQFVSLLLGNIEQIHGTYYVPLKDANNFPIAPGADQLLPLVDGADYFAIPLTITTKGVSYVDYDIVNRMNDMERNQMLPICVSQLKKNIDKGLEFVASRSASS

SEQ ID NO: 12 - DNA, 1134 bp, Saccharomyces cerevisiae
atgcctcactcagttacaccatccatagaacaagattcgttaaaaattgccattttaggtgctgccggtggtatcgggcagtcgttatcgctgcttttgaaagctcagttgcaataccagttaaaggagagcaaccggagcgttacccacattcatctggctctttacgatgtcaaccaagaagccatcaacggtgttaccgccgacttgtctcatatagacacccccatttccgtgtcgagccactctcctgcaggtggcattgagaactgtttgcataacgcttctattgttgtcattcctgcaggtgttccaagaaaacctggcatgactcgtgatgacttatttaacgtgaatgctggtatcattagccagctcggtgattctattgcagaatgttgtgatctttccaaggtcttcgttcttgtcatttccaaccctgttaattctttagtcccagtgatggtttctaacattcttaagaaccatcctcagtctagaaattccggcattgaaagaaggatcatgggtgtcaccaagctcgacattgtcagagcgtccacttttctacgtgagataaacattgagtcagggctaactcctcgtgttaactccatgcctgacgtccctgtaattggcgggcattctggcgagactattattccgttgttttcacagtcaaacttcctatcgagattaaatgaggatcaattgaaatatttaatacatagagtccaatacggtggtgatgaagtggtcaaggccaagaacggtaaaggtagtgctaccttatcgatggcccatgccggttataagtgtgttgtccaatttgtttctttgttattgggtaacattgagcagatccatggaacctactatgtgccattaaaagatgcgaacaacttccccattgctcctggggcagatcaattattgcctctggtggacggtgcagactactttgccataccattaactattactacaaagggtgtttcctatgtggattatgacatcgttaataggatgaacgacatggaacgcaaccaaatgttgccaatttgcgtctcccagttaaagaaaaatatcgataagggcttggaattcgttgcatcgagatctgcatcatcttaa

SEQ ID NO: 13 - protein, 377 aa, Saccharomyces cerevisiae
MSHSVTPSIEQDSLKIAILGAAGGIGQSLSLLLKAQLQYQLKESNRSVTHIHLALYDVNQEAINGVTADLSHIDTPISVSSHSPAGGIENCLHNASIVVIPAGVPRKPGMTRDDLFNVNAGIISQLGDSIAECCDLSKVFVLVISNPVNSLVPVMVSNILKNHPQSRNSGIERRIMGVTKLDIVRASTFLREINIESGLTPRVNSMPDVPVIGGHSGETIIPLFSQSNFLSRLNEDQLKYLIHRVQYGGDEVVKAKNGKGSATLSMAHAGYKCVVQFVSLLLGNIEQIHGTYYVPLKDANNFPIAPGADQLLPLVDGADYFAIPLTITTKGVSYVDYDIVNRMNDMERNQMLPICVSQLKKNIDKGLEFVASRSASS

SEQ ID NO: 14 - DNA, 1134 bp, Saccharomyces cerevisiae
atgtctcactcagttacaccatccatagaacaagattcgttaaaaattgccattttaggtgctgccggtggtatcgggcagtcgttatcgctgcttttgaaagctcagttgcaataccagttaaaggagagcaaccggagcgttacccacattcatctggctctttacgatgtcaaccaagaagccatcaacggtgttaccgccgacttgtctcatatagacacccccatttccgtgtcgagccactctcctgcaggtggcattgagaactgtttgcataacgcttctattgttgtcattcctgcaggtgttccaagaaaacctggcatgactcgtgatgacttatttaacgtgaatgctggtatcattagccagctcggtgattctattgcagaatgttgtgatctttccaaggtcttcgttcttgtcatttccaaccctgttaattctttagtcccagtgatggtttctaacattcttaagaaccatcctcagtctagaaattccggcattgaaagaaggatcatgggtgtcaccaagctcgacattgtcagagcgtccacttttctacgtgagataaacattgagtcagggctaactcctcgtgttaactccatgcctgacgtccctgtaattggcgggcattctggcgagactattattccgttgttttcacagtcaaacttcctatcgagattaaatgaggatcaattgaaatatttaatacatagagtccaatacggtggtgatgaagtggtcaaggccaagaacggtaaaggtagtgctaccttatcgatggcccatgccggttataagtgtgttgtccaatttgtttctttgttattgggtaacattgagcagatccatggaacctactatgtgccattaaaagatgcgaacaacttccccattgctcctggggcagatcaattattgcctctggtggacggtgcagactactttgccataccattaactattactacaaagggtgtttcctatgtggattatgacatcgttaataggatgaacgacatggaacgcaaccaaatgttgccaatttgcgtctcccagttaaagaaaaatatcgataagggcttggaattcgttgcatcgagatctgcatcatcttaa

SEQ ID NO: 15 - protein, 343 aa, Saccharomyces cerevisiae
MVKVAILGASGGVGQPLSLLLKLSPYVSELALYDIRAAEGIGKDLSHINTNSSCVGYDKDSIENTLSNAQVVLIPAGVPRKPGLTRDDLFKMNAGIVKSLVTAVGKFAPNARILVISNPVNSLVPIAVETLKKMGKFKPGNVMGVTNLDLVRAETFLVDYLMLKNPKIGQEQDKTTMHRKVTVIGGHSGETIIPIITDKSLVFQLDKQYEHFIHRVQFGGDEIVKAKQGAGSATLSMAFAGAKFAEEVLRSFHNEKPETESLSAFVYLPGLKNGKKAQQLVGDNSIEYFSLPIVLRNGSVVSIDTSVLEKLSPREEQLVNTAVKELRKNIEKGKSFILDSSKL

SEQ ID NO: 16 - DNA, 1032 bp, Saccharomyces cerevisiae
atggtcaaagtcgcaattcttggcgcttctggtggcgtgggacaaccgctatcattactgctaaaattaagcccttacgtttccgagctggcgttgtacgatatccgagctgcggaaggcattggtaaggatttatctcacatcaacaccaactcaagttgtgtcggttatgataaggatagtattgagaacaccttgtcaaatgctcaggtggtgctaataccggctggtgttcccagaaagcccggtttaactagagatgatttgttcaagatgaacgccggtattgtcaaaagcctggtaaccgctgttggaaagttcgcaccaaatgcgaggattttagtcatttcaaaccctgtaaacagtttggtccctattgctgtggaaactttgaagaaaatgggtaagttcaaacctggaaacgttatgggtgtgacgaaccttgacctggtacgtgcagaaacctttttggtagattatttgatgctaaaaaaccccaaaattggacaagaacaagacaaaactacaatgcacagaaaggtcactgttattgggggtcattcaggggaaaccattatcccaataatcaccgacaaatcgctggtatttcaacttgataagcagtacgagcacttcattcatagggtccagttcggaggtgatgaaattgtcaaagctaaacagggcgccggttccgccacgttgtccatggcgttcgcgggggccaagtttgctgaagaagttttgaggagcttccataatgagaaaccagaaacggagtcactttccgcattcgtttatttaccaggcttaaaaaacggtaagaaagcgcagcaattagttggcgacaactctattgagtatttttccttgccaattgttttgagaaatggtagcgtagtatccatcgataccagtgttctggaaaaactgtctccgagagaggaacaactcgttaatactgcggtcaaagagctacgcaagaatattgaaaaaggcaagagtttcatcctagactcttccaagctatga

SEQ ID NO: 17 - protein, 340 aa, Saccharomyces cerevisiae
MVKVAILGASGGVGQPLSLLLKLSPYVSELALYDIRAAEGIGKDLSHINTNSSCVGYDKDSIENTLSNAQVVLIPAGVPRKPGLTRDDLFKMNAGIVKSLVTAVGKFAPNARILVISNPVNSLVPIAVETLKKMGKFKPGNVMGVTNLDLVRAETFLVDYLMLKNPKIGQEQDKTTMHRKVTVIGGHSGETIIPIITDKSLVFQLDKQYEHFIHRVQFGGDEIVKAKQGAGSATLSMAFAGAKFAEEVLRSFHNEKPETESLSAFVYLPGLKNGKKAQQLVGDNSIEYFSLPIVLRNGSVVSIDTSVLEKLSPREEQLVNTAVKELRKNIEKGKSFILDS

SEQ ID NO: 18 - DNA, 1023 bp, Saccharomyces cerevisiae
atggtcaaagtcgcaattcttggcgcttctggtggcgtgggacaaccgctatcattactgctaaaattaagcccttacgtttccgagctggcgttgtacgatatccgagctgcggaaggcattggtaaggatttatctcacatcaacaccaactcaagttgtgtcggttatgataaggatagtattgagaacaccttgtcaaatgctcaggtggtgctaataccggctggtgttcccagaaagcccggtttaactagagatgatttgttcaagatgaacgccggtattgtcaaaagcctggtaaccgctgttggaaagttcgcaccaaatgcgaggattttagtcatttcaaaccctgtaaacagtttggtccctattgctgtggaaactttgaagaaaatgggtaagttcaaacctggaaacgttatgggtgtgacgaaccttgacctggtacgtgcagaaacctttttggtagattatttgatgctaaaaaaccccaaaattggacaagaacaagacaaaactacaatgcacagaaaggtcactgttattgggggtcattcaggggaaaccattatcccaataatcaccgacaaatcgctggtatttcaacttgataagcagtacgagcacttcattcatagggtccagttcggaggtgatgaaattgtcaaagctaaacagggcgccggttccgccacgttgtccatggcgttcgcgggggccaagtttgctgaagaagttttgaggagcttccataatgagaaaccagaaacggagtcactttccgcattcgtttatttaccaggcttaaaaaacggtaagaaagcgcagcaattagttggcgacaactctattgagtatttttccttgccaattgttttgagaaatggtagcgtagtatccatcgataccagtgttctggaaaaactgtctccgagagaggaacaactcgttaatactgcggtcaaagagctacgcaagaatattgaaaaaggcaagagtttcatcctagactcttga

SEQ ID NO: 19 - protein, 312 aa, Actinobacillus succinogenes
MKVTLLGASGGIGQPLSLLLKLHLPAESDLSLYDVAPVTPGVAKDISHIPTSVEVEGFGGDDPSEALKGADIVLICAGVARKPGMTRADLFNVNAGIIQNLVEKVAQVCPQACVCIITNPVNSIIPIAAEVLKKAGVYDKRKLFGITTLDTIRSEKFIVQAKNIEINRNDISVIGGHSGVTILPLLSQIPHVEFTEQELKDLTHRIQNAGTEVVEAKAGAGSATLSMAYAAMRFVVSMARALNGEVITECAYIEGDGKFARFFAQPVRLGKNGVEEILPLGTLSAFEQQALEAMLPTLQTDIDNGVKFVTGE

SEQ ID NO: 20 - DNA, 1242 bp, Actinobacillus succinogenes
atgaaagtaaccttattaggcgccagcggcggtatcggtcaacctctttcattgttgttaaaattacatcttccggcagaaagcgatttaagcttatacgatgttgcgccggtcacccccggtgtggcgaaagacatcagccatattccgacttcggttgaagtggaaggtttcggcggcgatgatccgtccgaggcattaaaaggggcggatatcgttttaatctgtgcgggtgtggcgcgtaagccgggtatgactcgtgcggatttgtttaatgttaacgccggtattatccagaatttagtggaaaaagttgcgcaagtttgcccgcaggcttgtgtttgcattatcactaatccggtgaactcgattattccgattgcggcggaagtgctgaaaaaagcgggcgtatacgataaacggaaattattcggtattactacgctggataccatccgttccgaaaaatttatcgtgcaagcgaaaaatattgaaatcaaccgtaacgatatttcagttatcggcggacattcaggtgtgacgattttacctttgttgtcacaaattccgcatgtggaatttaccgagcaggaattaaaagatttaactcaccgcatccaaaatgccggcaccgaagtggtagaagctaaagccggtgcgggttccgctacactttccatggcgtatgcggcaatgcgttttgtggtttccatggctcgcgcattaaacggcgaagtgattacggaatgcgcctatattgaaggcgacggtaaattcgcccgtttctttgcacaaccggttcgtttgggtaaaaacggcgtagaagaaattctgccgttaggtacattaagcgcatttgagcaacaagcgcttgaagcgatgttaccgaccttgcaaactgacattgataacggtgtgaaatttgttaccggcgaataattcaccaaaataatttaacaaaaccgattaaaggattaggtttttatgcaaacctaatcctttttgtttggtatcaatcagttaaaatccgccgtttgattaatgggaagctatataagattttagtattttatatagataaaaatagcgtggaagaataaagtaatcctccacgcgtcttctcaaatgtataaaaagtgcggtcaaaaattaatcgattttttattcatcctcgtttcttggcggtttaatcgccagtaaattacattttaacttactgataacatgttcggcggtgttgct

SEQ ID NO: 21 - protein, 331 aa, Yarrowia lipolytica
VVKAVVAGAAGGIGQPLSLLLKLSPYVTELALYDVVNSPGVAADLSHISTKAKVTGYLPKDDGLKNALTGANIVVIPAGIPRKPGMTRDDLFKINAGIVRDLVTGVAQYAPDAFVLIISNPVNSTVPIAAEVLKKHNVFNPKKLFGVTTLDVVRAQTFTAAVVGESDPTKLNIPVVGGHSGDTIVPLLSLTKPKVEIPADKLDDLVKRIQFGGDEVVQAKDGLGSATLSMAQAGFRFAEAVLKGAAGEKGIIEPAYIYLDGIDGTSDIKREVGVAFFSVPVEFGPEGAAKAYNILPEANDYEKKLLKVSIDGLYGNIAKGEEFIVNPPPAK

SEQ ID NO: 22 - DNA, 996 bp, Yarrowia lipolytica
gtggttaaagctgtcgttgccggagccgctggtggtattggccagcccctttctcttctcctcaaactctctccttacgtgaccgagcttgctctctacgatgtcgtcaactcccccggtgttgccgctgacctctcccacatctccaccaaggctaaggtcactggctacctccccaaggatgacggtctcaagaacgctctgaccggcgccaacattgtcgttatccccgccggtatcccccgaaagcccggtatgacccgagacgatctgttcaagatcaacgctggtatcgtccgagatctcgtcaccggtgtcgcccagtacgcccctgacgcctttgtgctcatcatctccaaccccgtcaactctaccgtccctattgctgccgaggtcctcaagaagcacaacgtcttcaaccctaagaagctcttcggtgtcaccacccttgacgttgtccgagcccagaccttcaccgccgctgttgttggcgagtctgaccccaccaagctcaacatccccgtcgttggtggccactccggagacaccattgtccctctcctgtctctgaccaagcctaaggtcgagatccccgccgacaagctcgacgacctcgtcaagcgaatccagtttggtggtgacgaggttgtccaggctaaggacggtcttggatccgctaccctctccatggcccaggctggtttccgatttgccgaggctgtcctcaagggtgccgctggtgagaagggcatcatcgagcccgcctacatctaccttgacggtattgatggcacctccgacatcaagcgagaggtcggtgtcgccttcttctctgtccctgtcgagttcggccctgagggtgccgctaaggcttacaacatccttcccgaggccaacgactacgagaagaagcttctcaaggtctccatcgacggtctttacggcaacattgccaagggcgaggagttcattgttaaccctcctcctgccaagtaa

SEQ ID NO: 23 - protein, 330 aa, Aspergillus niger
MVKAAVLGASGGIGQPLSLLLKTSPLVDDLALYDVVNTPGVAADLSHISSVAKISGFLPKDDGLKHALTGADIVVIPAGIPRKPGMTRDDLFKINAGIVRDLVKGIAEYCPKAFVLIISNPVNSTVPIAAEVLKAAGVFDPKRLFGVTTLDVVRAETFTQEFSGHKDPSAVRIPVVGGHSGETIVPLFSKAAPAFQIPADKYDALVNRVQFGGDEVVKAKDGAGSATLSMAYAGFRFAQSVIKAAQGQSGIVEPTFVYLPGIAGGEDISKATGLEFFSTLVELGTNGAEKAINVLDGVTEKEKTLIEACTKGLKGNIEKGIEFVKNPPPK

SEQ ID NO: 24 - DNA, 1482 bp, Aspergillus niger
atggttaaagcgggtgagtggctctttcacggcgcctgcatttcgaccccgctttctagaacgagagcaaccccagactaatcactaatacatctcgacagctgttcttggagcatctggtggcattggccaggtacgtgtccctcatttgtccctatcagaactgcagcccgcgatgcagacctaccacattcttcaacttttactgactccccacgcgtttcccatcggttagcctttgtctctcctgctgaagacatcccccctggttgacgacctcgcgctctacgatgttgtgaacacccccggtgttgctgccgacctttctcacatctcctctgttgctgtatgtgtgaccgtaccacaacgcgctcccctatgccaaacaatttgacaccctttctgacattttcggcagaaaatctccggattcctgcccaaggatgatggattgaagcacgccttgactggcgctgacattgttgtcatccctgctggaatcccccgtgagtgtatcacctcccctgttcctagaggcgtctgactgacaaagccgctgctcataggcaagcctgggatgactcgtgatgatctcttcaaaatcaacgccggtattgtgcgcgacttggtcaagggtatcgctgagtactgccccaaggcatttgttttgatcatctccaaccctgtcaattcgactgttcccatcgccgcagaggtccttaaggctgctggcgtctttgaccccaagcgtctctttggtgttaccactctggatgttgtccgcgcggaaacctttactcaggaattttctggccacaaggacccatctgctgtgcgcatcccagttgtcggtggccactcgggagagactattgttcccctctttagcaaggccgctcccgctttccagatcccggcagacaagtacgatgcgctagtcaaccgtaagtggaccgtgcagtctcttggcaattgaatcgtttattgaaccatatgcaggcgttcagttcggtggagatgaggttgtcaaggccaaggatggtgccggctccgcgaccctgtctatggcctacgctggcttcaggtttgagtccttcatttacaaacatttggtgtcggggctaacttcatatcaagatttgctcagagcgttatcaaggctgcgcaaggccagtcgggtatcgtcgagcccacctttgtctatctgcctggtatcgctggcggcgaagatatttccaaggccactggcctcgagttcttctctaccctcgtagaacttggcgtaagtcattcattatgtgatatttgaatattgggcatcactctgactcgacaaatcagaccaacggggctgagaaggccatcaatgtacttgacggcgtgactgagaaggaaaagacgctcatcgaggcctgcaccaagggcttgaagggcaacatcgaaaagggaatcgaattcgtcaagaaccccccaccaaagtaa

SEQ ID NO: 25 - protein, 600 aa, Kluyveromyces lactis
MNNNNITPESDSMKSNDNDQTNDYMPDVADFDHTQTNTNEIARAISHPGSVLSRVASYVSRKDRYVDENGNEVWQDDEVSILMEEDETPDFTWKNIRHYAITRFTTLTELHRVSMENINPIPELRKMTLHNWNYFFMGYAAWLCAAWAFFAVSVSTAPLATLYGKETKDISWGLSLVLFVRSAGAIIFGIWTDNYSRKWPYITCLGLFLICQLCTPWAKTYTQFLGVRWISGIAMGGIYACASATAIEDAPVKARSFLSGLFFTAYAMGFIFAIIFYRAFLNVNGENYWKVQFWFSIWLPAVLILWRLVWPETKYFTKVLKARQLMRDDAIAKNGGQPLPKLSFKQKFANVKKTVSKYWLLFGYLILLLVGPNYLTHASQDLFPTMLRAQLRFSEDAVTVAIVVVCLGSIAGGMFFGQLMEITGRRVGLLLALIMAGCFTYPAFMLKTSSAVLGAGFMLWFSILGVWGVLPIHLSELSPPEARALVSGLAYQLGNLASAASVVIENDLADLYPIEWNSAVKVTNKDYSKVMAILTGSSVIFTFVLVFVGHEKFHRDLSSPHLKSYIERVDQTEEVAAMTGSTANSISSKPSDDQLEKVSV

SEQ ID NO: 26 - DNA, 2150 bp, Kluyveromyces lactis
tctccggtacctttttactatctctcactaaaataactctaattcagtatgagcccgctggatgtaccacacctgcgtttcttgatatataaaagtaactggtttggcgtctttttttcgacaatcaacgttcttccaatcttgttgtggttgtgtcttattattattgtaatgtatgtcttgtatgatctggagtaaccaaaaccaaaacagatttcaaccatgaataacaacaatattacaccagagtctgactctatgaaatctaatgataatgatcaaacaaacgattatatgccggatgtagcggatttcgaccatacgcaaaccaataccaatgagattgctagagccatttcccatcctggttcagttttgtcacgtgttgcatcgtatgtgtcaagaaaggacagatatgtcgatgaaaacggtaacgaggtgtggcaggacgatgaagtgtcgattcttatggaggaagacgaaaccccagatttcacttggaaaaacattcgtcactatgcgatcactagatttaccactttgaccgagcttcatagggtatcgatggaaaatatcaatccgatcccagagttgagaaagatgactttacacaactggaactatttctttatggggtatgcggcttggttatgtgccgcttgggcgttctttgcagtgtccgtttctacggctccattggctactttgtacggcaaagaaactaaggatatctcttggggtctttcgttggttcttttcgttagatctgctggtgccatcatcttcggtatctggaccgataactattcgagaaaatggccttacatcacttgtttgggtttattcttaatctgtcaactttgtaccccatgggccaagacttacactcagttcttgggtgttagatggatttctggtatcgctatgggtggtatctacgcttgtgcctctgccactgccattgaagatgccccagtgaaggcaagatccttcctatcaggtcttttctttaccgcatatgctatgggtttcatctttgccatcatcttttacagagctttcttgaacgttaacggtgaaaactactggaaggttcaattctggttctctatctggttaccagctgtgttgatcttatggagattggtttggcctgagactaaatatttcactaaggtgttaaaggctagacaattgatgagagacgatgccattgccaagaacggtggtcaaccattgccaaaattgtctttcaaacaaaaattcgctaacgttaagaaaactgtttctaaatactggttattgttcggttacttgattctcttgcttgttggtccaaactacttgacccatgcctctcaagatttgttcccaaccatgttacgtgctcaattgcgtttctctgaagacgctgttaccgttgccattgttgttgtatgtttgggttccatcgctggtggtatgttctttggtcaactaatggaaatcaccggtagaagagtaggtttgctcttggcccttatcatggccggttgtttcacttatccagctttcatgttgaagacaagttctgctgtgttgggtgcagggttcatgctttggttctccattcttggtgtctggggtgttcttccaatccatctttccgaattatctcctccagaagctagagctttggtctctggtcttgcctatcaattaggtaacttggcttctgccgcttcggtcgttatcgaaaacgatttggctgatttgtacccaatcgaatggaactccgcagtgaaagtaacaaacaaggattactctaaagttatggctatcttgactggttccagtgtcatcttcacttttgtcttggtatttgtcggtcacgagaagttccacagagatttatcctctcctcatttgaaatcttatatcgaaagagttgaccaaacggaagaagttgctgctatgacaggttccacggccaattctatttcttctaagccaagtgatgatcaattggaaaaggtttcagtttgattaatgattaacagaaactaaacctttatacaatwtcatgcccacacacgcaccatagcattataaaaaggaaaaaaggaaaacattaaattaaatgactacacccacactcatgtgcactttat

SEQ ID NO: 27 - protein, 543 aa, Kluyveromyces lactis
  MOD_RES (38)..(38): Any amino acid
  MOD_RES (197)..(197): Any amino acid
  MOD_RES (209)..(209): Any amino acid
  MOD_RES (235)..(235): Any amino acid
MAAESIVSRDESIASLEKAEGRITYLKPQSRITWSDAXKYLATRIPTLFPTKASIREARKEYPINPFPALRSMNWLQTQYFIVGFLAWTWDALDFFAVSLNMTNLAKDLDRPVKDISHAITLVLLLRVIGALIFGYLGDRYGRKYSFVLTMALIIVIQIGTGFVNSFSAFLGCRAIFGIIMGSVFGSAFLGCRAIFXIIMGSVFGVASXTALENAPNKAKSILSGIFQEGYAFGXLLGVVFQRAIVDNSPHGWRAIFWFSAGPPVLFIAWRLMLPESQHYVERVRLEKLENDGKSQFWKNAKLACSQYWLSMIYLVLLMAGFNFSSHGSQDLFPTMLTSQYQFSADASTVTNSVANLGAIAGGIIVAHASSFFGRRFSIIVCCIGGGAMLYPWGFVANKSGINASVFFLQFFVQGAWGIVPIHLTELAPTEFRALITGVAYQLGNMISSASSTIEASIGERFPLEGREDAYDYGKVMCIFMGCVFAYLLIVTVLGPENKGGELRLSTTGTEQDDEESQNNNIIRRNCRGWTSFGSKFQARNST

SEQ ID NO: 28 - DNA, 1632 bp, Kluyveromyces lactis
atggctgcagaatcaatagtgtctcgcgatgaatccatcgcttcacttgaaaaagcagaaggtagaatcacatatttgaaaccgcaatctaggatcacatggagtgatgctaasaaatatttggctacaagaatacctactttgttcccaacaaaagcatcgattagagaagcaaggaaagaataccctataaatcctttccctgccttacgttcgatgaactggttgcaaacacaatactttatcgttgggttcttagcatggacttgggatgcgttagatttctttgccgtttcattgaacatgacaaatttggccaaggatctagacagacctgtaaaagatatttctcatgccattactttggtgttgctattaagggtcatcggtgctcttatctttggttatttgggtgacagatatggtagaaaatactcatttgttttaactatggctctcattatcgttattcaaatcggtacagggttcgttaattctttctctgctttcttggggtgtagagctatctttggtatcattatgggatctgtatttggttctgctttcttggggtgtagagctatctttgktatcattatgggatctgtatttggtgttgcttctkccactgccttggaaaatgctccaaacaaggctaagtccatcctttctggtatattccaagaaggttatgctttcggtwatttattaggtgtcgtgttccaaagagctattgttgataattctccacatggttggagagctatattctggttcagtgccgggcccccagtgcttttcattgcttggaggttgatgttacctgaatcccaacactatgtcgaaagagtccgtttggaaaaattagaaaacgatgggaagtctcaattctggaagaatgctaagcttgcctgttctcaatattggctaagtatgatttacttggttcttttaatggcaggtttcaacttctcctcccatggttctcaagatcttttcccaacaatgttgacttctcaataccaattctccgctgatgcatcaactgtwacaaactctgttgcaaaccttggtgccatcgctggtggtatcattgttgcccatgcctcctctttctttggtcgtagattctctatcattgtatgttgtattggcggtggtgctatgttatacccatggggttttgttgctaataaatctggaattaatgcttcagtcttcttcttacaattcttcgtccaaggtgcttggggtattgtcccaattcatttgacggaattagccccaacggagttcagagctttgatcactggtgttgcttaccaattgggtaatatgatatctagtgcctcctcaactatcgaagcctccattggtgaaagattcccacttgaaggtagagaggacgcttatgattatggtaaggtgatgtgtatcttcatgggatgcgtgttcgcttacttgttgatcgtaaccgttttgggcccagagaacaagggcggtgagttgagattatccactacgggtacagaacaagacgatgaagaatctcaaaataacaatatcattcgaagaaattgtcgcggctggaccagtttcggatctaaatttcaagcaagaaattcaacataa

SEQ ID NO: 29 - protein, 616 aa, Saccharomyces cerevisiae
MSSSITDEKISGEQQQPAGRKLYYNTSTFAEPPLVDGEGNPINYEPEVYNPDHEKLYHNPSLPAQSIQDTRDDELLERVYSQDQGVEYEEDEEDKPNLSAASIKSYALTRFTSLLHIHEFSWENVNPIPELRKMTWQNWNYFFMGYFAWLSAAWAFFCVSVSVAPLAELYDRPTKDITWGLGLVLFVRSAGAVIFGLWTDKSSRKWPYITCLFLFVIAQLCTPWCDTYEKFLGVRWITGIAMGGIYGCASATAIEDAPVKARSFLSGLFFSAYAMGFIFAIIFYRAFGYFRDDGWKILFWFSIFLPILLIFWRLLWPETKYFTKVLKARKLILSDAVKANGGEPLPKANFKQKMVSMKRTVQKYWLLFAYLVVLLVGPNYLTHASQDLLPTMLRAQLGLSKDAVTVIVVVTNIGAICGGMIFGQFMEVTGRRLGLLIACTMGGCFTYPAFMLRSEKAILGAGFMLYFCVFGVWGILPIHLAELAPADARALVAGLSYQLGNLASAAASTIETQLADRYPLERDASGAVIKEDYAKVMAILTGSVFIFTFACVFVGHEKFHRDLSSPVMKKYINQVEEYEADGLSISDIVEQKTECASVKMIDSNVSKTYEEHIETV

SEQ ID NO: 30 - DNA, 1851 bp, Saccharomyces cerevisiae
atgtcgtcgtcaattacagatgagaaaatatctggtgaacagcaacaacctgctggcagaaaactatactataacacaagtacatttgcagagcctcctctagtggacggagaaggtaaccctataaattatgagccggaagtttacaacccggatcacgaaaagctataccataacccatcactgcctgcacaatcaattcaggatacaagagatgatgaattgctggaaagagtttatagccaggatcaaggtgtagagtatgaggaagatgaagaggataagccaaacctaagcgctgcgtccattaaaagttatgctttaacgagatttacgtccttactgcacatccacgagttttcttgggagaatgtcaatcccatacccgaactgcgcaaaatgacatggcagaattggaactatttttttatgggttattttgcgtggttgtctgcggcttgggccttcttttgcgtttcagtatcagtcgctccattggctgaactatatgacagaccaaccaaggacatcacctgggggttgggattggtgttatttgttcgttcagcaggtgctgtcatatttggtttatggacagataagtcttccagaaagtggccgtacattacatgtttgttcttatttgtcattgcacaactctgtactccatggtgtgacacatacgagaaatttctgggcgtaaggtggataaccggtattgctatgggaggaatttacggatgtgcttctgcaacagcgattgaagatgcacctgtgaaagcacgttcgttcctatcaggtctatttttttctgcttacgctatggggttcatatttgctatcattttttacagagcctttggctactttagggatgatggctggaaaatattgttttggtttagtatttttctaccaattctactaattttctggagattgttatggcctgaaacgaaatacttcaccaaggttttgaaagcccgtaaattaatattgagtgacgcagtgaaagctaatggtggcgagcctctaccaaaagccaactttaaacaaaagatggtatccatgaagagaacagttcaaaagtactggttgttgttcgcatatttggttgttttattggtgggtccaaattacttgactcatgcttctcaagacttgttgccaaccatgctgcgtgcccaattaggcctatccaaggatgctgtcactgtcattgtagtggttaccaacatcggtgctatttgtgggggtatgatatttggacagttcatggaagttactggaagaagattaggcctattgattgcatgcacaatgggtggttgcttcacctaccctgcatttatgttgagaagcgaaaaggctatattaggtgccggtttcatgttatatttttgtgtctttggtgtctggggtatcctgcccattcaccttgcagagttggcccctgctgatgcaagggctttggttgccggtttatcttaccagctaggtaatctagcttctgcagcggcttccacgattgagacacagttagctgatagatacccattagaaagagatgcctctggtgctgtgattaaagaagattatgccaaagttatggctatcttgactggttctgttttcatcttcacatttgcttgtgtttttgttggccatgagaaattccatcgtgatttgtcctctcctgttatgaagaaatatataaaccaagtggaagaatacgaagccgatggtctttcgattagtgacattgttgaacaaaagacggaatgtgcttcagtgaagatgattgattcgaacgtctcaaagacatatgaggagcatattgagaccgtttaa

SEQ ID NO: 31 - protein, 586 aa, Mus musculus
MATCWQALWAYRSYLIVLCLPIFLLPLPLIVQTKEAYCAYSIILMALLWCTEALPLAVTALFPIILFPLMGIMEASKVCLEYFKDTNILFVGGLMVAIAVEHWNLHKRIALGVLLIIGVRPALLLLGFMLVTAFLSMWISNTATTAMMLPIGYAVLEQLQGSQKDVEEGNSNPSFELQEASPQKEETKLDNGQAVSVSSEPRAQKTKEHHRFSQGLSLCICYSASIGGIATLTGTTPNLVLQGQVNSIFPENSNVVNFASWFGFAFPTMVILLLLAWLWLQVLFLGVNFRKNFGFGEGEEERKQAAFQVIKTQHRLLGPMSFAEKAVTFLFVLLVVLWFTREPGFFPGWGDTAFANKKGQSMVSDGTVAIFISLIMFIIPSKIPGLTEDPKKPGKLKAPPAILTWKTVNDKMPWNILILLGGGFALAKGSEESGLSKWLGDKLTPLQHVPPSATVLILSLLVAIFTECTSNVATTTLFLPILASMAQAICLHPLYVMLPCTLAASLAFMLPVATPPNAIVFSFGGLKVSDMARAGFLLNIIGVLTITLSINSWSIPIFKLDTFPTWAYSNTSQCLLNPPNSTVPGH

SEQ ID NO: 32 - DNA, 24910 bp, Mus musculus
gacaggctggtcctcaccatggccacctgctggcaggcactatgggcctatcgctcctacctgattgtgctatgtctgcccattttcctgttgcctctgccactcattgtccaaactaaggtaaggactggtgggtctcattcagtataagtgactcaaggggtgacgtcagggtcaaagtggggcatccttaggttttccttttcacctcccttccccagaaagtgaagccaccacctcctggtctttctgagagccaagggtggtttccgcagggcactttggagcctgctggtttgtggtcagaaagccaattgcataaaggaaatgcagccgacagatgagtttatctgactattgtgtgcccattagcgctgagctcagtgccagccagggacaggaagagccaagtgggtaactagcttttgagaggataagtaggagagagctggcctcaggcagctgtgccctcgaagataaaactaagataaatgactcacctgcagtctcacgggtggccactgagggggacccctttcagtgtgcacagccagagcacaaggtgcctgcctccttcccatctcaagaggttattcacttgaaaccccaccccccacccgcgcctgtgacgggcatcgagggattctgtgcttcatcttatgagccaggtcccactgtcccattttgcagatggggaaaaggaaggtaagtcagttattcaaagtcccaggacagaacttggtgccttggagcttggtttctatgtcctttgtggtttctctgtaagaaaattaacattaaatccgggtgtggtggcacacgcctttaaaataccagcactcagaagcagagacaggcagatctttgagttcaaggacagccctggctacgtagagagaccgtgtctggaggaggaggggcattatatgacaaatttaaaattagcttggaggtctggagatacaacccaatcaatggtaaggtttttgtctgtcttgtgcaagatctggggtttaataatccctagcaccatcaaaactaacaaaaacacagacaaaaaaaaaatccctaaattttagctaggttagtggtggtgcacaacttcaaacccaaaatttaggaggcagaggcaggtggatccctgtgaattctaggtcatcctggtctacagagtgaattccaggacagctagggctacatagagaaaccttgtctcgggggatgggggtgggggtggggggaatccctagatttgaatgaaagtatcctagagctttgggaaaggaagctccaagagggattcagacctcagcctcaaagtctagctgcctctgcaaaggacatggatgggtgggggcagaactagcggtgtggctgtctccaaaactgacactgaatcttggccatggaccatcccacgcccctggttctgcccaatgagccactacttgttgctacagataggggaaatcaatccaggaaggccttgggtttgcgttatctctgagggagaaggctcaggatacggtccccaacacttgcccagtgataaggccagactgattttggagataacctttctcagacaagtggcgtctctaagcgggggattgctcagatagatttcggacaggctggaacacgtgtgacaccaccaccatcctgggagaggcacacatagctcagaaagattcattgttttgccccggggtcacgtggcagagggaagctgagttgtttcgagaaagctgtgccttttggtgaaaggatggtgtgcagtggcgggagtgtgaagctccagggtttgctctgctgtacctggccctgccacctgcttctgcttgccctctgttgactcaatcaactgtcctgagaggtcaggccctcatttggaccttgggttcctatcctacacaagaatttgtggtcaatttctccttccctgcttgactgagcccatcaccatataaaccagattttatgcttctcatggcaaactgtcaagaccctgcaggtcacagtcactctttctctgagcctgccttccttttctataaccattcctttgctataaccatagcaagcctcagagtgtgcctgcacgcgcgtgcacacacacacacacacacacacatacacacacacgtgtgtgctttctttcctcactcctgacactgctatccagagtcccactagcttccagggtcctaacccaagacccatcctcaaccctgcagcaagatttgtcccagatggtcacacccactttgccctcacttgactttagtgacaccttctctgtctgagagacagtgactccttctctgtcagactcggcaggtttcccagcatccttcctgtcttcccccccccacacacacacccactccaacccctcctgattcctggccaggtaattgtatactgtctcataattggaaaagcatccctcttagctgggtgtggtatcactcacctctaatctcagcatttgggaggctgaagtagcaagatcatgagcccaaagccagccggggctaagtggtcagaacttgcctcaaaaacaaaacaagaacctccctgcccccaagaccttagtctaggatcctactccagacctctacagttgtatcagccaactgtcttgggtatttggtccacacaaatatttctctataatcagcctggcatccagatccaaaccaaagctcagcctggcacctcagaagacttttcacatcgtctcattgagaaatgtctcaatgcctttgatgctagccatgactccagccattctgaagggtccactttcccccacctactcacacaccagcagtccccgcagcacactcccaaagtgtctgcattatgatcctgtagtgccagggaagtgttagtgattcccccaaaacagacaggagccaatctggtgcaagtcaccgcagggtctttttattctattcgagctagcttgggctcccaggcacaccggccggcagtcacacaggatgattcttggtgagaagaggagcccgggatatctatcaggcaaggttttctagaaagcggcaagcaagggggtggggtgagtgtacatctaattggaaagctgctgtggcctttagcataattggctggtgctgggaatcaaatcataaacttaatctctagttccctctgtattggttagacaggaggtgggcttgtaacctgggggtgtaaacctgtaggggaataacctggagacgctggtcttgttgggggtcagtctagagactggagttaggttctggttttgttgtgggggtgtaacttggaaactaatgctaggtactgacctgttagtttacctgaattcaaacttaggtcaggttcttaaaaatggagtctgaacttaaaagatttggcctctcaatcctagtaaactcatcctaagttgagacttctataaatggaaaacacaccgtgcatccactaatggctacccactaaccacagcctggcgatgcagctcagggcaaaacccccgccgctgccgccccaccctccctaccccacccccgtcagatcacactagtcactccggcgttttatttacagagcagtccctgtttgaaaggatcctggctgaggctgaggatgtcattccatgggcagagagggtttgcctaacatacatgaggccctggatttactactctctagcactctgagcatggtggcacagtcctctaatcgcagcagttgggatgtggagacaggaggaccagaagttcagggtcatccttagttacacagtgaggttggagttagcctggtataaatgaggtcctgtcaaaaaaaaaaaaaaaaaaaaagtgtgtatttgtttactttcttcctaatctgtgaggctgggagtttgacttactctctggcccctaacatgggaaggagagcccaagccaaggttcagatctccataataaatcagttaacgtttactaaatgtgttttatgtgcttggcactgggccaagcaccataaagacttaattcagttgtttcccacaagagacgtctttgtttgtttgtttgtttgtttgtttgtctgagacaaggtttctctgtgtagccttggctgtcctggaactcactctgtagagcaggctggcctcgaactcagaaatccatctgcctctgcctcccgagtgctgggattaaaggtgtgtgccaccacgcccagccagagacctctttttgaccatgatgttactgccgctgcctccacttcatagacatggaaactgaggcccagaggggtgatgtaacttgcttccgatgccatctggaaaaagaagttgagacactaatctgatattagagtctcctcctgaagctatccagagaggcaaggaggtcccccatgactgatcccttcaaatcctcctccttcatgaccacccagccaagccctcctcttttctctcaccaatgcgtgtgacctcctggctctttcccagagtcaaaggacaaaatacagatgttttgcagaaaatgtagttagggtctagaggaagagacaggtgtttgtgccacacagatgtagcaagagggctggagcactcaggacaggcagtggctacctcaaaggagtcaagatagactgagtgtccaggtggaaccacagctgtgagaggcgacagacatcggaaaagcagacgacctgcaataaccattgtatgaaacgaatgacaggcgatttcatgaaatgctgtccctttggatggtgtcagctgatacagtacagtgtggcacttgcccagccttcaggcacgatggcagaaacttgtcacccttatgggtgaacctcgcactcggtgctgtgtgacagacaccatttatgagttctggagagatgagtgggggacttgtcatcctcggggggcagagggggacatagggacagatacaaaagattgtgtactgcccacgctgcagaagagttatggcaagtgttgacatatatgaactggggaggagctagctgcccttagtacagagctcaagtcaggcctcccagggagtggacagttaccctaagaccagagtggcagtaagagccagttagacccagctctgggtaaagaactgtccaggcagaacccgcagtaggtgcaaagtgccaacgcagggatgagcttggcgagttgacagggcaaatgccagtgctgcctgctcgactacagttccgtgtcagtgaagttcagaaggaaggggagaggacagctgatggcagccctgtgaagctggggaagaagtggggacttcatgcttcaggcaagaagggataaagagcacatccgggttcctataaatgtcagtcaaaaatgcaaaacctcttggaacctaaaaagatcctctgcaaaactcagtcatggctccatgttgtccgttaagaacagaaaagagcagaattctttaagcatggccacaggacacacagttctgtgcatcctcagacaagctactcctgtccccagagcagagagcacctatacaagggatggagactctctgtctactgaggcttcccgtctctaggagaagacagagaatagcacatggcttttggagccaggtaggtgacagagggttctcacccactccaggccgttatcacacatctgcaggccttccaatcaccaagggcctttgtgagaaggagatgcaaccccagcaccagggtttcccatcctagggttctataaacccccacacccttcccatctgcccctggctcctgcagagcacagaaggccttgggccctatgtggataccacacttccccacagctgttcagacgagttgttggccccaccagagctcttggatgcatggatgcttctatgaaatagagaggtgtatcttgtcaatagccccaaatggtgagtggtggtccccagcagagaagggaagctggaatgtacagagataggtttcatctagaagcaagatttgaaagagtcacccccgccccccagccaaagccaggagatcccttgaaatagagacagaaagtaccctcatgttgattttacctgctgattactaaatcgtgacctgactcataggcacccataggagcgtcgtgggaaaggaaggtagagtctttgatggtaaaacctgattacagtctacatggaaacctgggctactgggatgatccaatgcccagcaggctgtgggaatgccggttcgtgtcactcagcctgtttgagcccactctgcagcaactggagcaggcctggctccaggcacaaactgtgaagttaggagtcattctcaaaggtacttggtggactgaggctggaggattatttgagcctaagaggtcaagggcatcttggtaatttagtgagaccttgacaaggagagagggagggagaggaagttctctgacaaaggcatagctgtgttgaagattttgccaagggagtggttaaaatgttctaattgtgaagagttggaatgttgcagatcaagaattattgaattatctttagttcacttaatggccatgtggtacccggattgtatctgacctaacatctctgtgatggctcggaaaggttgatgggatgtattgctaaccttagcaatcctagtacctctactatgcctggcattgagaaagctatcagttagcatctaagtgagacccattgttgagatcttcaggtttggctgtagcctcacattgccagtccctagcaatgcattcagaaaacactttggtttctggctttcttccattctgaggtcaaaactgtgcttgtaccaggtggtggtggcacatgcctttagacccagccattgagagtcggaggccatccttgtctacagacaaccagagctttatggagaaacactttttttaaaaagtacacatagtttctcccaaactgcatctggccaaaggtgctcacgtttggatcaaattgtgtgtgtgtgtgtgtgtgtgtgtgtgtgagagagagagagagagagagagagggacagagagagagagagagagagagagagagcgctttgttttggaaggaagggaacgagatagggagccaggaccgactcttcctcggttctcagagatagtatgaacaagcagccattcccaacaggaaccaggtcacagcattcacccaaatgagaacaaaccaaggcaccagctgccatcactgtgtttggcagagcctcaaaggcaggtggaggctcttgaggctttaaaatagacaatgacttcaagtgttcctcactgggggctgttagcctagcaaggctctagaagaggaccactctgtaccattgctcgtggggatgagagttggctttccctggctggtcctcagttgaaagtagtagatgggaaagcacacactcctgctgcaagataaaggagctggggatggggtggggctcaggtagttatcatctatctgttattcctgggaaagatcacacagacacacacacactcacacacactcacacaccccacatacatacgtatacacagacatacatacatacacacaagtgcatatacactcaggcatgcacacactcatgcatgcgctctttctctctctttcacacacacacacacatacaaacacacacacattctctcttcatttcagtatgatttccttcttcacagtcctgtgctgttttattttgtatgttttaaaggcttagtctgaaaaaaatgcaagccttcttcagacagtgaaggggttcctggttcccaaccctgggtaagaaacccctatcagaggcccccctacaaatgtacaaatgctctcacgtgccagcatatcacctacatggccttccttctgtgcttcatcatctttctttctttcttgggctgcgaaggaacccagtgcctcttgtatgctaagcacagactccgctgtccagcatcaccccagccttcaagtaattgcttagttaaaacactatcctctctatatatctctctgcttcaatccttcaaaagccttccattttcactggcctatctactagagaaggttctagatctttctcgaggcagacaagattcttgtcaagtatacatctcttcaggcccctgcctgacctttctgcctcatttcccacccttctgtatctactctccacccgacctctgttgccgcagctgaactcctacactcccctcagctcccactcagcatctcctccctggaagtcttcctcgctccagcagtagggggctcagcaaagggcatctcctcttgggagcctcactcttctgggttcctttgcagtggtgcttaacaagttgccacctaaatgtcctagcttgcttgaaaccctgagaatatccttgtaccctggtagcagcatccccattttggggggctgaagggcagtgggagtggcctgctgtgagcctgtcatctccaccccaggttaaccttcaattacctggaggaatgacctagggcaccattgagactgtgggtgtttgctatcatctcagagctgtgctgtgctgtgcgtgtggttaaaggctatgctgtccatagccgttgtctgccctggcttctctggcactgtcatttccacgtgtgtctcatatatctgcctggttctcttgaaggccaacacttactttactctctgacaaaccccacccaccgttcaccaggtgcagcccatttccactcagccatacctgttagcccacttcctccctatcctatcctcaccaggatagatgtttcttttttttttcccatgaaggagacacatctgtgtacagctggaaaaaaaacaacctttcatattttttagggcattaaaaaaacccaagcgaggttaaggggattgtctgaggatgtagcaataagtggtttgtccaaggattcaccaaccattctgggtctgggcgctcaggttttgagcagatgtgttctttccacagtgaaataattgagcccccagccttggacgtggaggctcctgtaaggcattaccctccctgtttacttctggcttttcaggccagcccacgtagccagcatgcagagactctgggactccctgaaggccgagctgggcatgaatcacatcttacaaggcagtgcatctgctcactgtttttgtctgttcgtttttttagcagaagcagacttggacagtctatggtccaatgacaaagactgatactcatatatttcataaaactgaatgctgccaggcctggtggcgcacacatgtaatcccagcccttggaaggcagagattccatcatgatccatagagcgagcctcagtctcaaaaagaaaagatgtgggaggggctcccctgacaaaagaatacctggttgaagatctaggaatgagtgggcatccactgggcaaaatggggaggaagacaaagtccaaaaagaaggacttccgagcaaaggtctctgtgaccatgagtgaggacagagggcttgagggaatcatgggagagaatgtctggccaaactggaacagagcctgcaagagtgaaaagtatacggtacagggcacccagactccgtatggaactcagagaacttgggcagggcatgcctgccggcactgagctaccaaacaacaaagaattagttactaagccaagaataagttgcttcagtgttacaatccagaccgagagctgggagcagctcccctccaggtctgaagagggaggaggcagaaagagctcagtacaaaactcttctattgcatgaactctgggccctggttcaggctctgccctccccccaaaaggaaactgtgcccctgagatctgtgccacccagtggccctggggagctgccagaggcctgcacataagccagcagggctgcatgtcagggctgccagcccacgtccgcagttctcggctgtcagacaatgagtcttagtgaggccttcctgaagtccccatccctagagctggcggtgccgacctggagtcagacatagcgtggcacaggagagaaagtcaccccagtgccctgccctttggcagtgcctggacggtggcacctaaccacagaacctcacagaaccctggcagcacactagctccaagctggactttcctactttcaaaaagtgggtcaaggcattgccaggccacaggcattgcccagaatattacttgaaaatgtgtaaaacaaacaacgaagactggcagaagaaaacagttatgaatcatggtttccaggaaaaccccgctgaggtttagaaataacgtctttccttgctggtgccattttcaaacactatgctgaaagggatctggaggtgacaggcagaagccatgtgggcaggtggccagtatagctacaatccaatgtttgtaacagaaccaggccaggtggcatacgcctattgtcctagctactcctgaggctgaagtgagagggtcatttgagtcccagagtttgaggtcagcatggacaacttagtgaaaccttgtctcaaaaacaaaatatctataacaaagtcaccaaccaataacaacaatggggagctgagaagacagctcagtgactaaaagttgtgtaatggtgggttagattcccagtgtctgagttttaaaaatgagcgcagttggcacacacctgtaatcccaacacctgtgatcccaacacctgtgatcccaacaaacacctgtgttcccaacacctgtaatcccaacaaacacctgtgttcccaacacctgtaatcccaacacctgtaatcccaacacctgtgttcccaacacctgtgatcccaacacctgtgatcccaactgtgtggcactggagccaggaggattcctggaactttggagctggccagactagcctagtcagcaagattcagtgagagatcctatctcaaaaaactaaggtggagagcagttgagaaagatatcctatgtcgaatacacacatgcacatgaacacttgtacacatacacatgcacacacacattacacacacatacacacaaagtgacaataacacagatgagcctcagctccataatcctgtttttaaggttttatttctatgttctttatttctatgttaaaacagacaactttgctttacctacctcaaacatgcgcaaaacatgtcatttttctacatgggcaaacttgtccaaaacaaagcctacatttttgttgttggacattgagctattttataactatgggtgtgtttgtttatttattgtgtgtatgtgcatgtgtgtcatggtatatgtggaggacaacttgtgagagttggttttctctgagttctaggttttgcactcacattgcagccttgacggcagtgcctttatccactgggccatctcatctgtctggccctgcttctttggttggtttcagtttttgctgtgagtaaaggtctcatgtagcccaggttggcctgaaacaccctatgttgctgaatttggccttgaaatcctgacccttctgcctcccacccaagtcctaggcttacacatatatcacgatactacacaaagcctactttataatcaagtgttgaacatcgctttttagtcactgactccaaagtgaaagacagacaaagtatggcaagatacggaaagctgtggaaggtgtggctaagtgtggcaaagtatggtaagatatggtaagatgtggaaggtagggtaaggcatggtaaggtgtggtaagtaagatggggtaaggtatggtaagatgtggcaaggtatggcaaatatgttaaggtgtgataaggtatagtaaggtgtggtaacgtatggttgccaaggaatggtaagctatgataatgtgtagtaagttatggtttctggtgaatgcttctttgtgtaaacatgatgtgccaggctcatagtgagccttctgtgagccagggcagtctgtgctgacttcttcctcagctgtgctcatagccttcactagacacatctaaaggaacagtttagttcttccatcgaagttcacaggtcccaggatttcatgtcccagctgaaaatctatagtccaggaaagacaaatgagcaacagtcactatgctagggagatggaatggggacacaggaccaaagccatcagggtcaaggtggctagatgggatgttgagacacattggaggagctaggcatagctatcacgtgggtaaggataggggccccacgctagacatacaggacctgtagtctctccaggcagctgcattgactgtgataatggggtctcaaagatgaagcaccttgcctcggtgtgggtggcacacgccagaagacttaggcaggagagtggcctgatccccagagtttgcctcagcctcccagatgctaatcacaggcatgagcccctgagtctcactgggcagccagcctcacctaagaggtgagctgtaggacagcgagaaaatctggctgactgctcctgcggaacaccacctgatgttctcacacacacacacacacacacacacacacacacacacacacacacacatacacacacagcaaagccccttatacacatacacatacacacacagcaaagccccttggtgaatctgggcagtaggcagtgccaggccctgggaaggtggttgtttggcttcagaactccagttctctccttgtccagtcccagggagcctgagccccttgctgaagggaagacttgagcagaggaaggtaaatgcagagctgaggagccaggtggcctggtttgccacttactattggtgggactttgatagttgatctaatcaatctacacctttttccttttttctgtgaaccgggggatggggaggggatggggggaaccagggcatttgggacctcaaggaacaactgaatgtgactgaagagcattcaaaacccacaggacacaaggcctggccaggaggcagcttgggatacctggcaaagctgtcttctggaagcaacagtgttgacctccaacctcctgtctttgaatgtgcagttctggggtttggggcacaagggtccagagtgggtggcctgcccttagtcctaggggtgggtaaggagttgtctgtccagccagggcaagtacagaggaacaagaaaaaaactggcatcagcagaaaccagctggttgtggaagcaggaggatctctggtcaagggtcataggggccctacccctgagttgatgaattcaggcccgggactggaaagggtagaggttgagtgtgttcaatcaattcttgacatcactgaatgaaatgagagcttgcccagagacagccaagactctgcagctccaggaacaccttcctatctatttccaagggcgtgttctctggagcacatgggcttacacagtcctgtctctcaacctagtgcctgtcctaactcaaccactccctagttctcaagaccttgagcaagccactcgcttccggggcacatccgtaaagggagaccaccacacccaccttaatggtgcttacattttcaacccagaagtcctaaaagttgctcaataacagtttcctcttccctggagcctctcctcctcactctccaagaaactctcctcatcagagtactaaggctgttgggtataaggagaaagcaaacaattaaacggataagtgtcccagcccacagcctacaaaacccctgcccgccattcctttctcagcaaacagtctgggcaggcgtccctacccaggggcgtccctctgggtaatcattccctggtcctgggagaggccctgccagggaggctggacccctgatgtcttgagcccatgtctggcttctgactattctaggcttaaggtcaggaactgtgggccagaagatggaaataaagaatttctggtacctcaaatctgtgcctcagagtagccccaaatctcttacataatgcaaggcttggaagaggctcccacatactctgtaaaagtgaactgtgccttccattgtatgctgagtggcccaagcaggagatctatctcaaagaattcctggggattcctttcctcagacaagattagcttcaaaactgagacccatagatcctgggctccagggatcgcagatgccaccaagctgactctgtcctgggttaggacttagtggcagaagcctttcccagcatgcctaagggcctaagttccacccccaccccagaaccaccaactaaagcaacatatgagaaggatcagagtcctgagcagggcctgattagtcttaagctaaatgagacttgttacaatgtcttagctccactgggctgtggtggcacatgtctttaatctcaggactcagaaggcaaagacaggcagatctctgtgacttcaaggccagtctggtctccagagttccaggatggctaggtttgttacacaaagaaaccctgtctcaaataaaacaaaaacaaattaaaaaaaaaaaaaaaagtcttgctgggcagaggtggcacaattccagcacttgggaggaaaaggcagggggatttctgagttggaggccagcctggtctacagagtgaattccaggacagccagagctacacagagaaacactgtctcgaaaaacaaaacaaaacaaaacaaaacaaaacaaaacaaaacaaaacaaaaaaagtctcggccctaaggtcaaagacaagaggagaacaccattttttaagtttgggacagggttttactggccacataaaccatcattaatccctgcacggtagatctctgtgttaaggacaaccttgtctacatagtaagctccaagctagccagggctctgtttcaaaacaaacaacaaaaataaaaaaaaaaataaaaacacagaacttaagataatgtttcatgcatagcccaggctgtcttcaagcatgctatgtagtcaagggtgactttggactcctgactgcctgtgtctacctcccaaaggctgggcttacaggctgcatggtgcttgggagtgtatatgaggcactatgcatactaggaacactctacctctgagccatagccccagctcttcatcgtttgtttccaccctgagatgggaccttggacttgcatcaagtgttcacaagctctcctcatgctggtgcaaatggccaagtctgttctctggggggggggggggggcagaagggattgtagctgcgctgtccaactgctctgcttccctcctcctgcccacaggaagcctactgtgcttactccatcatcctcatggcgctgctgtggtgtacagaggccctgcccttggctgtcaccgccctcttccccatcatcctcttccctttgatgggtatcatggaagcctccaaggtgagcacccccatccacagagggaaagactacagggaaaaggaaaatcctccctagagccttggaaccaaagaagcctcatcacaaggtcatggaagaaggcagagggcatgagagaggatcagtcaggaggcagagagtatcctagaaacgtgtggctgttgtgagagttcattcacagtaggagggatgagccctgccagagaggtgcaaggccacctgcaacaagaggaggcctatgacagccaactaaggatctcacccaacacctggtcctggtagcacattattgtaaggctggcaccaagaggctgagatgggaagatcttaagttcaaggccaacctgggctacgtaggtagatcctgtcaaaaacaaacaaaaagatcaactgttctttctatctatctatctatctatctatctatctatctatctatctatctatctatctcttggtctccacaaagccaaagtgtgctctaaaacgccctttggattccaagatcccaggatgctcaattctcttacataaaatgtatagaggttttgtagtgtgagggcacatcttccttgtgatacctaataagtagtttctatactgtattggaaatagggctgggagatggctcaggggataaaggcgcttgctgtcaagctagacatcctgagttcagtccctgggatccacacaggagaagaagaagacaaccctgcaagtcatctttggacctccacacttgagccataatacatgtacacacacacacacacacacacacacacacacaacacatgcacacactcaaaacatgcatgcaaataagtgtaagactttaaataatgatgcacaggagagtctgtacccttcagaataaatgcaatttcttcctatttccttttttttgtttgttttgttttgttctttcgagacagggtttctctgtgtagcctagatgtcctggaactcactctgtagaccaggccagcctcgaactcagaaatccacctgcctctgcctcccaagggctgggattaaaggtgtgcaccaccaccgcccagtgcctgactattttctacacgaggttacctcatccatgaatgcagacgccacatacaaaaatctaatagaggactgactgcacattctattaaaaagatgtttgtatttgatgcacacatttatgtgtatcacatttgtgcctggtaccctcagagatcacaagagggcattgaatgcccttgtgttaaagatggttgtgaaccatccagggacactgggaactgaacccgggccctctggaagagcagaaagtgctctgaactgatgaaccatctctctggccctccagctatacttctaatgtaatggctcttgagtttgaatcgcaccagaacaaccagaactgagaagcaaaccagatagatgggccttcatctgagctcacctaaatctaaaggattttcctctttctcttcccttcctctttcctcttcttcctccttctctctcttcctcctccctcccttcttccttctcttagtcctcttccttctccttcattctaacacagcttctttctgtgtagcccaggctggcctcgaattcacagcttccctgctccggggacttcagctgagctaccaagccccgctgaacatttggcttgtaaccggtctcaggggatggtgttgatactggcccagggatgacacatacgttctagaaagagcagagaattagttatctcccagttctcagcttgaaccacaactggactcaggctagagcctcccagtctttgagaggagaagaggagtgagtttaggaggagcaggcaacctggctcctgtcaacggtcggtggcccaaaggccatttccatttggttctgaggtcccaagggaatgccaatttgtaacgatgtcatgactgttccccacaagctcggtggtatcaggaggagaccccagagtctcagacacatacctgctctcccccaggtctgcttagagtacttcaaggacaccaacatattgttcgtcgggggtctgatggtggccatcgccgtggagcactggaacctgcacaagcgcattgcccttggagtgctccttatcataggagtgcggcccgccctgtgagtccgtgctagccaggtgggaggaacaaacgggcatcctatgtctggaagacagctggagtggcagtgtgtctgtctgtttggttctaggctgcttctgggcttcatgttggtcacagccttcctctccatgtggatcagcaacacagccaccacagccatgatgctgcccatcgggtatgcagtcctggagcagctgcagggctcacaaaaggatgtggaggaaggcaatagtaacccttcctttgagctccaggaagcaagtccccagaaggaggagaccaagcttggtaagagacatgaaacagactctatcctcagcccctccatgcttgggaaaacctaacatgactacaaaagtattcatcttggagcccatgggggagagagagagagagagagatgagtggccaacctgtccaggtctttttgaggctttcctagatttaaaatgccagtggaggttggtgagatatttcaggaggtaagggtacctgccagcaagcccaaagacctgagttcgatccctgggatccacatgatagaaagagggaactggctcctgcaagttgtcttcagactttcatatgtgtactgaggcacgtgcattcgcacactcgtgtgtgtgcgtgcgtgtgtgtgccagtgtgtgtgtgtgtgcatgtgcatgcatgtgtgtaataataataataataataataataataaatagttattattgttattactaacaacaataataacaccataataattttgtttcaaaaatattaaatgccaagatccatggggctaaaaatggtagggcagttgcgcagcatgttgagtcctggtaatgtaacaatgataacaatagtaaacaccaaagagcgaagcaccctgtgctaggacccttcattcccagcaatccaagagtttggtgagaagcgagctaaagtctgggacatgggacgtgttctgggctttattcctcctgcttggtctaggtaaccctcttcacatctctgtgcttcagttccccaagacacgttgaaccagaacgtgtctgagaagcccacagctccagagaatgctggaatctggagacagcctctgcccacggcccctggaggcctcaggacaaagtcaggactcctgcagttactcttgtccctgtccccacatgcttttccttgttcacagataacggtcaggctgtatctgtttcttcggagccaagagctcagaagaccaaagagcatcaccgcttcagccagggcctgagtctctgcatctgctactcagccagcattgggggcattgccaccctgacgggtaccacacccaacctggtgctccaaggccaggtcaactcgtgagtgccagcggtgggggcagcatgacaaaagggggcttgcactctcactgagtgacaaatgggaccaggcagttttagggtcactgttacacaacagcccatgtcttcttcatcaggatcttccctgaaaatagtaacgtggtgaactttgcttcatggtttggttttgccttccccaccatggtgatcttgctgctactggcttggctatggctacaggtcctcttcctgggtgtcaagtaagtggtgccttaggtaagagaagcccagtttcctgcccatacccctgggagcctctgtttcattcaacgtggtgggggaccatgctgcaagtaaaccttccctctctttaggttcttggcctcccacatgagagaattactgggtgcagaatgctgcccctgttaacagacaggcaagatgagtctgatggaatggtgaattctgggatggaaaaccatgccgtgtgtgtgtgtgtgtgtgtgtgtgtgtgtgtgtgtgtgaggggggtccccttattttctgagacaaggtctctcaataaatctggaagtcatctggattgctctggctagccagtgaaccctagggctcctttagtctctgcatccctacagccattcttatatgagtgctgggactgaactcagatctggatgttcacatggcaagtatcttaccaagtaaaccatctctccagccctgaagaccccagccaggcaccttcccatagtgctccatggtccttggatgagctgttggggattcctcaaggaacacagtttgttagagaagcatttgaggtgattcttctgtttgcctatgcacgcatgcatgccctagacactcggactcccagaccttaggcaaatccccttccttgctgtacttcatctgacgggtgatgatatgacgggagctgtaagaaaagcaagcacagggagtggccatgtcagaacgttcctggacatggtatcagtcttgcaggactgatagccaggtatagaaatgcaagtaggcatccaggcaggacacgcacagagcatagaggccagaatgacctgggtgtgtcttggcagcctgcttctcgagagctatagtacaaagaagccgttggggaacagtcacagggaactttgtgtgtcacatagagtcagacccttgtccttgaggccaagatgaggagataaatttcaaccctgagttactcctcattacagtttggagatctatgttgagatctatgtagccggatgtggcggtacatacctgtcatctctatacctggggagctgaggcaggaggattacgagttcaaggccaatctcagttacatagcaagactctatcttacaaacctaaaatggagtaaagtagtcatatgccctgctaaggctcacttgaactggagtctgtaatctattattgatgtctcctgggcacatagattggattggtagtctgagtgttactggggtgtgaattgtggttattcgtccatcctttctaggcagagaagagtcgtagcaagctgtttagctgtactttgaacaaatcacttgggaaggtacaggaggctgggttagggttggaagctgctacagggcaagggagtagctgatgaagtcagcacgctgttggatacagtgaggagtcacagatgtgtgaaacatgctctttgcccccaagaaactcacagaccagcaagagataagatttactcaagtgtaaagtcaaatgccaatgttaagaaacagcatgaggaggcagccaaagccttctaatggctaggactaggaaggtacatctgagcctggtaggagttcctggaatactaatgaaaagaggactcagcatcaggacctgaagtcacttggggtctggaccactcatccttctcaccttggacaggaagggcttgacacaagagactcttcagaggaagggtcacggtggggaagagaggaagatataactttcttgttaaagaaaagctacaatcccaagccaggcatggtggtacacacctataacccaggtactcaggaatctgaggcaggaggatcaaaagatggagaacagcttaggctaaaaacaacaaaacaacggcttagtggagagcttacccggtatgcaagaaaccctgggtttggtcctacataatctgtgcatgataatggatgcctgggattcaaggtcagcctgggttatatgagactctgtctggagtgggggagccaggccatgatgcccttctgggtctaggactcttttctagagccaggacattagggcttgcccatgcctggtgcagagcctttatacactgtccctgcctctgcccacagcttccggaagaactttggctttggggaaggggaagaggaacggaagcaggctgccttccaggtcatcaagacccagcacaggctgctgggccccatgagttttgcagagaaggctgtcactttcctgtttgtcctgctagtggtgctctggttcacgagggagccgggcttcttcccaggctggggtgacacagctttcgccaataaaaaagggcaaaggtgagaccttccaaagcaggagaggggaaggcctgagggactgcacggagagcaggaaaaggaaggaagaaggcgggaagggagttagggaagagacagggtgtctctctcgggggcaggctgatgggagggacccttctctgtcccctactcagccttccttcccaccctttccacagcatggtatcagatgggacagtggccatctttatcagcctgattatgttcatcataccctccaagattccaggactaaccgaggacccaagtaagcacctggcctggggctgggaagggtctccggcagcccctgtgtgcaggtatatagcctttgaccacatttggcaggagccagcaaagctcctttgggtgacctgctaaagacacagggactcaaggacagagttggaatcctacagagatgggagactgagggctccctctacctaccttaagctctgataggaacccgcttaggaaggaggggaggggaggcctattcacttttggtgatcatccttgtctgcttggggagtagaaaaaccagggaagctgaaggctcctcctgccatcctcacctggaagacagtgaacgataagatgccctggaatatcctgatcttgctgggtgggggctttgccctggccaaaggcagtgaggtgagagtctgtctgagggagatcctgggatagtcccaccctaggcttaagcacctttccccgaggtgggttcttgaagcccaaaggagagtagtcctctcagcgatgagcctcacccccacactacccacatactcctgaagtcagtgcaatgagcctaaccaccaaagctagcaacagtttgatgcagttccagaggaagcctccagaggacgccagataacagtctttcagggaccgaagcgtctttctcttgactttccatccaaaaaagagctgaaattccagatactgtagccccggacctccaggtcctagcagagatgagctaagggttgatataggagatttctgggtctgtgcttagcgtatcgacagtctgggccaggcactttgtttggtgtggagacacaggaacacagtgcctggaaacagcattagcagcaggtcccacagcctgacatgacagtgggtgaggccagaccaggagctcttcctaccctgggatttgcccattttcccaatagcctcttcccagcctcttcaaggccctgctccccctccctgtcaggagcacagccccttaagccctaatactcagcagggagaggactcaggtgatccagggtctccaaggagtcaagaaagtaaggtgattacacccacaaatagccaggttgcccactaggacctccccctcctcatcccactggtctcaaggaacaggaggaagcttccttggttccagctgggtaccaacttccttcatagctgtttgacttaaaggccacagaggtgtgggcagggatagggtttcccagagttccagctgagaacctgaggaccccagacagttctgtctcatatatatcacctccttctggcttcaggaatcaggtttgtctaagtggctgggagacaaactgaccccgctgcagcacgtaccgccatcagccaccgtgctcatcctctctctattggtggccatcttcactgagtgcaccagcaacgtggccaccactacactatttctgcccatcctggcctccatggtgagctgacactgaagcttcctccaggcagccctcctgtttgctctctatcccctactggtcagagtggttggtctaaacctctccgtgaagagaacctcctaagtgtctccccttttctccagatgttgaactcttaggtcctaaggccttctggcccctgagtcacctgtttcaggtgacatcattctttgagtatcccagtggggctgactggaggcctcacccacctccccacccaatcccctgttctggtcattccagaagtgatgggggtaaaattgctccctggagcgtccccagccccttcctcctcaggcgtgttcccacagcctttgatgacacctcctgagcccctttgagatcagttttatgagcccctcccatcactgcaccccacagggcagggcagcacagtcatctcttctgagaggtcaaggggccctctccaggtcacccagagcgctctgcccagggactgagttcatgacaagagagaaaaggggtggggcaggcccccaaaagggagaggcagaagaactggggtctagccttcccactgagcctgaattgggatcaattatgtccactgtcactctccaggcacaggccatctgccttcacccgctctatgtcatgcttccctgcaccctggctgcctccctagctttcatgctacccgtggccactccacccaacgccattgtcttctcttttggaggcctcaaagtgtctgatatggtgagtggcggggaagtcagaacgcctcagcctttcacctgcctgagggtcactgaggtttccagaaaagagctggccctggtgcgtgggggtggggggcagctctgacatctttatgttctacagtaccaagtcacaaataaggggaggggaacatttggaaggtgtgggcaggggagggggggtgcagcatccccacttaatgaaatgacctaagagaaaacaaggcccagaaccccaggaatgtataaggaacccccactttccctgttaggatcagtcaaataagagacaaagacattgcctaacactgcaggttagactgaacctgaaggcaggacttcccaaggagggctttgctgatgggaggggttctgagtagccctgacaattgaggaatgtgtctctgattcacattggcttgcctcatcctaggcccgtgcaggattcctgctcaatatcatcggagtgctgactatcacattatccataaacagctggagtatccctatcttcaagctggacacatttcccacctgggcctactccaacacaagccagtgccttctcaatccgcctaattccactgtaccaggccactagactatggtacaacctagctctgctaggggaaaagccgctggtgccactcctcggagccaggagagggcgctccaaactccaagtcccgggacagaggtgcagaatcggctggcgcatgcgaaatcatgtattcgtgtgtttgcctacatcctgtatgtgtgctctccggtgaagaggaagatgctcgtgtctccgtgtggtgtgcgtggacgcttgcgtgtggtgtggcctgagggctcctcagtagttgtatgcatggcaaccgcgcccgccctctgactcccagctaggcctccagatctctttgccctgtatttattgaaactctgggcaggaggcccctgggagcaggaactccaaggttcattaaaggctttttcagtagagtccgggtgtgtttcccggtgttcag

SEQ ID NO: 33 - protein, 441 aa, Streptococcus bovis
MEKKLPATAANETDWRNKLTKTRIGSVTLPVYLVTASIILVTALLEQLPVNMLGGFAVILTMGWLLGTIGGNIPILKHFGGPAILSLLVPSIMVFFNLLNQNVLDSTDILMKQANFLYFYIACLVCGSILGMNRKILVQGLMRMIVPMALGMILAMGVGTLVGTLLGLGWKHSLFYIVTPVLAGGIGEGILPLSLGYSAITGLPSEQLVGQLIPATIIGNFFAIMCSGLLSRLGEKRPELSGQGQLIKITNSDDLSDALEEDKAPIDVKLMGAGVLIACTLFITGGLLQHLTGFPGPVLMIVVAAFLKYLNVVPKETQRGSKQLYKFISGNFTFPLMVGLGMLYIPLKDVVGMLSWQYFVVVISVVFTVIATGFFVSRFMNMNPVEAAIVSACQSGMGGTGDVAILSTANRMTLMPFAQVATRLGGAITVITMTAIFRMLF

SEQ ID NO: 34 - DNA, 1326 bp, Streptococcus bovis
atggaaaagaaattgcccgcaacagctgctaatgaaacagattggcgcaacaaattaaccaaaacgaggattggttcggttacgttacctgtttatcttgtaacagctagcattattcttgttacggctctattagaacaactaccagtcaatatgttaggtggttttgccgtaattttaacaatgggttggttacttggaacaattggtggaaatattcctattttgaaacattttggcggtcccgcaattttatctttattagtaccatcaattatggtctttttcaatttactcaaccaaaatgtcttagactcaacagatattttaatgaaacaagcaaactttctctatttctatattgcttgtttagtttgtggaagtatccttggaatgaatcgcaaaattttagtccaaggtttaatgcgcatgattgtcccgatggcattaggaatgattttagcaatgggcgttgggacccttgttggaacactgttaggtctcggttggaaacatagccttttctatatcgtcactcctgttttagctggtggaatcggtgaaggtattcttcctttatcccttggttatagtgccattactgggttgccaagtgaacaattagtggggcaattaattcccgcaaccattattggtaatttttttgctatcatgtgttcaggtttacttagtcgtttaggagaaaaacgccctgaactttctggacaaggtcagttgattaaaattaccaattcagatgatttaagtgatgctttagaagaagacaaagcaccaattgatgtaaaattaatgggcgctggtgttttaattgcatgtaccttatttattacaggcggtttattgcaacacttaacaggctttcctggtcctgttttgatgattgttgtcgcagcctttttaaaatacttaaacgtagtaccgaaagaaacccaacgcggatcaaaacagctttataaatttatctctggcaattttacgttcccgttaatggtcggcttaggtatgttatatattcctttaaaagatgtcgtaggaatgcttagctggcaatattttgttgtggtaattagtgtcgttttcactgttattgctacaggatttttcgtttcacgcttcatgaatatgaatcccgtcgaggctgccattgtctccgcttgtcagagtggtatgggtgggactggcgatgtggctattttaagtacagccaatcgaatgaccttaatgccgtttgcacaagttgcgacacgtttaggcggtgccattacagtaataacaatgactgctatttttagaatgcttttttaa

SEQ ID NO: 35 - protein, 540 aa, Arabidopsis thaliana
MNGGDVTVAGSDDLKSPLLPVVHNDEPFERQTVGQQLRTIFTPKNCYIALGPLLCAVVCLCVDLGGDETTTARNMLGVLVWMFAWWLTEAVPMPITSMTPLFLFPLFGISAADDVANSYMDDVISLVLGSFILALAVEHYNIHRRLALNITLVFCVEPLNAPLLLLGICATTAFVSMWMHNVAAAVMMMPVATGILQRLPSSSSTTEVVHPAVGKFSRAVVLGVIYSAAVGGMSTLTGTGVNLILVGMWKSYFPEADPISFSQWFFFGFPLALCIFVVLWCVLCVMYCPKGAGQALSPYLHKSHLRRELDLLGPMNFAEKMVLAVFGGLVVLWMTRNITDDIPGWGRIFAGRAGDGTVSVMMATLLFIIPSNIKKGEKLMDWNKCKKLPWNIVLLLGAGFAIADGVRTSGLAEVLSKGLVFLETAPYWAIAPTVCLIAATITEFTSNNATTTLLVPLLIEIAKNMGIHPLLLMVPGAIGAQFAFLLPTGTPSNVVGFTTGHIEIKDMIKTGLPLKIAGTIFLSILMPTLGAYVFASMGGV

SEQ ID NO: 36 - DNA, 3097 bp, Arabidopsis thaliana
aacacattataataaaagaaataaataaatttataaaaaggctcatttctcttcttctttggttcttacatttctctatatcattttttgtccttccattaaaaacggaataaacagaatgaacggtggtgatgtcaccgtcgccggatccgacgatctgaaatctccgctcttaccggtcgtccataatgatgaaccattcgaacgacaaacggtgggacaacaacttcggacaatattcacgcccaaaaactgttacatcgctcttggtcctcttctttgcgccgtcgtgtgtctatgcgtagatctcgggggagatgaaacgacgacggcgaggaacatgctcggtgttttggtgtggatgttcgcgtggtggttgacggaggccgttccgatgccgatcacctccatgacgccgctcttcctcttccctctctttggtatatcggctgcggatgacgtagcaaattcttacatggatgacgtcatctcccttgtactcggcagcttcatacttgctctcgccgtcgaacactacaacatccatcgccggcttgcccttaacgttagtctttcctttatctctttatcttcttcttcttcttcttcttttttctacataatttattcaatatttgattctttccgattgtgtgcgggtccacgggtgaattaattacaaaatatgatcgttaaataggtggattgcttcaattgaatccctacttataaaattaaacattacaatgtgtagtggtccatgttttatacgtggtgatgccagattatatgtttttccttccccatacatttttttccccacacacatttatttcgttttaattcttcttcaataatttgtgtgttcaaagtctaatgataacttgatcatttaaagttaagttattaacatacaaagagtcctttatttcaattttttaaacaaaatctttttcatatgcattttattttattttatttgtatcatagatgagatgtcatttcatgaggccctaggccaatccataattccatttatatgacaacccaaaaaaaaagatgagagacacgtaaacactatgtttctccagcaaaagcaatgatagtgagtatgatttaatttgtgcaagtgcgggctccaataattagctcacaagtcacaactataatcattgtttacttttatcatgtttttaaactataattaatcgtacgagagatatcctatgattaagagaaaactcaccagtcaccacgtatctaattatgataagctaataccataacttaatggataatctaattcttgaagataacgttggtgttctgcgtggagccgctaaacgcgccgctacttctgcttggcatctgcgccacaacagcgttcgtaagcatgtggatgcataacgtagcagctgcagtcatgatgatgcctgtcgctacggggatacttcagagactgccctcgtcatcatcgacgacggaagtggtgcatccggccgtggggaagtttagcagggcggtggtgttaggtgtgatatactctgcggcggttggtgggatgagcacactcactggaacaggagtgaatctgattcttgttggaatgtggaaaagctacttccctgaggctgatccgatcagttttagccaatggttcttctttggcttcccattggctttgtgcatattcgtggtgctttggtgtgttctttgtgttatgtattgtcctaaaggagcaggacaagctctctctccttatctccataaatctcatctcaggagagagcttgatttgttagggccaatgaacttcgctgagaagatggtcttagccgtgtttggtgggttggttgtgttgtggatgacaaggaatataactgatgatatccccggctggggtcggatcttcgccggccgagccggggatggaaccgtgagtgtgatgatggcgacattgttgtttatcatcccaagcaatattaaaaaaggagagaagctaatggactggaacaaatgcaagaaactaccatggaacattgtcttgttattgggagctggattcgctatagccgatggagtacgcaccagtggcttagctgaggtcttatccaaaggacttgtcttccttgaaacggctccttactgggccattgctccaacggtttgcctcatcgctgctaccatcacagagttcacttcaaacaacgcaaccactacattgttggttccgttactcatcgaaatcgcaaagaacatggggatccatcctttgctcttgatggttccaggagccattggggctcagttcgctttcttgcttcccacgggaacaccctctaacgtcgttgggttcacgacagggcatatagagatcaaagacatgatcaagacaggcttgcctctcaagatcgctggaaccatctttctctccatcttgatgcccactcttggtaatttactcaaaaccttcttctttatataataagattcattgtagtttagttttcttatagatattgttacatgatgccaggggcttacgtttttgcatcaatgggaggagtttagttctacaagccaagcacaagaccatgtacacaattgatttattgtactatattgtttactaccgtaatacatatgtagatatatagtcaatggaatgggaaatttagatgaggtcaaaattcacaaaatcggcccatttttgtaacccgcccgattatagtttccggtaccattgctttcttttgtgcttccaacgtaccggtaactttggtccctttttttttttgtttggtgtgtatatgaaaaagggttaatacagatttgtgtgttcttcttcctaacaatagcaactagtggcaaatccagcgcgcggtccaacctggccataccataccacgtcattgtccagcgtgtcttcttctgttttcggttttctacaaacacaaaaagcaaagaaaacaaaacatcaatgcatggtttataacgtcttgctttttaattagtttttgtcctttacactcatttatgttctttctttgtcctttgctatacactacttgtctattgaataatatgcttataatcg

SEQ ID NO: 37 - protein, 600 aa, Rattus norvegicus
MAALAALAKKVWSARRLLVLLLVPLALLPILFALPPKEGRCLYVILLMAVYWCTEALPLSVTALLPIILFPFMGILPSSKVCPQYFLDTNFLFLSGLIMASAIEERNLHRRIALKVLMLVGVQPARLILGMMVTTSFLSMWLSNTASTAMMLPIASAILKSLFGQRDTRKDLPREGEDSTAAVRGNGLRTVPTEMQFLASSEGGHAEDVEAPLELPDDSKEEEHRRNIWKGFLISIPYSASIGGTATLTGTAPNLILLGQLKSFFPQCDVVNFGSWFIFAFPLMLLFLLVGWLWISFLYGGMSWRGWRKKNSKLQDVAEDKAKAVIQEEFQNLGPIKFAEQAVFILFCLFAILLFSRDPKFIPGWASLFAPGFVSDAVTGVAIVTILFFFPSQKPSLKWWFDFKAPNSETEPLLSWKKAQETVPWNIILLLGGGFAMAKGCEESGLSAWIGGQLHPLEHVPPLLAVLLITVVIAFFTEFASNTATIIIFLPVLAELAIRLHVHPLYLMIPGTVSCSYAFMLPVSTPPNSIAFSTGHLLVKDMVRTGLLMNLMGVLLLSLAMNTWAQAIFQLGTFPDWANTHAANVTALPPALTNNTVQTL

SEQ ID NO: 38 - DNA, 3206 bp, Rattus norvegicus
ggccgcccggtctccggcgatcgcgcggatggcggcgctggcggcgctggccaagaaggtgtggagcgcgcggcgcctgctggtgctgctgctggtgccgctggctctgctgcccattctcttcgccctgccgcccaaggaaggccgttgcctgtatgtcatcttgctcatggcggtgtattggtgcacagaggccctgcccctgtcagtgacggctcttctgcccatcatcctcttccccttcatgggtattctaccctccagcaaggtctgtccccagtacttcctcgacaccaacttcctcttcctcagcggcctgatcatggccagtgccattgaggaacggaacttgcaccggagaatcgccctcaaggtcctcatgctggttggggtccagcctgcaaggctcatcctggggatgatggtgaccacgtcattcctgtctatgtggctgagcaacacggcttccaccgcaatgatgctgcccatcgccagtgccatcctcaagagcctctttggccagcgcgacgctcggaaggaccttccccgggaaggcgaggacagcacagctgctgtgcggggaaatggacttcgaacagtgcccacggagatgcagtttctcgccagttcagaaggaggccacgctgaggatgtagaggccccactggagttgcctgatgactccaaggaggaggaacatcgcaggaacatctggaagggcttcctcatttccattccctactcagccagcatcgggggcaccgccaccctcacaggcacagcccccaacctcatcctgctcggccagctcaagagtttctttccacagtgtgatgtggtaaattttggctcctggttcatctttgccttccctctcatgctgctgttcctactggtgggctggctctggatctccttcctctacggtggaatgagctggaggggctggaggaagaagaactcgaagttacgagacgttgcagaggataaggctaaagctgtgattcaggaggagttccagaacctagggcccatcaagtttgctgaacaggctgtcttcatcttgttctgcttgtttgccatcctcctcttctcccgggacccgaagtttatccctggctgggccagcctcttcgcccctgggtttgtttcagatgctgtcaccggtgtggccattgtcaccatcctgttcttcttcccttcccagaagccctcactcaagtggtggtttgacttcaaagctcccaactcggagacagagcccctgctgagctggaagaaggcccaggagacagtgccctggaatatcatccttctcctgggaggtggctttgccatggccaaaggctgtgaggagtcggggctgtctgcgtggatcggtgggcagctgcaccccctagagcatgttcccccactgctggctgtgctactcatcactgtggtcatcgccttcttcacagagttcgccagcaacacggccaccatcatcatcttcctgcctgtcctggcagagctggccatccgactgcacgtgcaccccttgtacctgatgatcccgggcacggtcagctgttcctacgccttcatgctgccggtctcgacgccccccaactctattgccttctccactggacacttgctggtcaaagacatggtgcggaccggccttctgatgaacctgatgggtgtcctgctgctcagcctggccatgaacacctgggcacaggccatcttccagctgggcaccttcccagactgggccaacacccacgctgccaatgtgaccgcactgccacccgccttgaccaacaacacagttcaaaccctctgaacactgatggggacttctttttccggctgggcgttcctcccagcgggttgttgctgttgttgctgctgggatcctacaagctgatcgagtaattcttccctgtaatctgctaggaggctgccagccaggttccctgggccacaggctcactgtctgcagcgccttctctttctttctcatgcatttcaaagctaactcctgcacctgatgcctgaggaacaggcttttctcaccgagctggtctgtggccacggtgtggggaaagtccacttgagccacaagctgaaatggcgaggctgaagtggtgtttgttttgcaacacctagggtcgagggtatcgagacaggaggagctatgtgactgcaaagctccagatgttacagatgttcacagctggctggattctgccttttctgtttaaccatctcccttgcagatgatacctggcagctagaggtcggcttccattgcctgaggcggagggagtacacaggtcttcctggagtctctctgctgcttccccaatctcgcaagcagcacaccatggggtttgaaaaactccaactcacacatctatccaagatgcctgggattctctttttttcatctgattctcttaggaccaagctctaggtcagccttgctcattatccttctagggccctcctgtctgtggccctggggaggggctctgtggctgcagaccaccagctgtttttactctaacaactgggtttggcctcccccccccccccgccccacatgatcagtaagttctatttgcaaaggccacaatcttcaggggtgagagaaaaatctgaaagacgtggagacctgtgagaaaaccagggcaaagtatctcaggccagaagtgtgctgtaacattgtgacattgtaacatcctgcagatggagaccccacccccacccccagtccccttccaccagaggccgaagcctgaaagcagacagttgctgtccttattcccagtaaaagcctctgatactctgcgaacagcacactgtggggacagtgggcagctcggaactcggctgacaccagaggtggaaccatcacttcctccagagggtggacatccgaaggatggacactttctgttaaggcacaagtgagtcagagtattttcccagagctgggctggagggggcctgagctggaagtgacactgtaagactgagtcagcaccccctgggtctggatagtgggatccctcaggggacaaggacgggcatacacagagaagaccatggccttgtgaccacaggattcatgatttctgatactgctgatccaatatgcgctcaaataaataaagactgttagtcaaaaaaaaaaaaaaaaaaaaaaaaaaaaa

SEQ ID NO: 39 - protein, 500 aa, Homo sapiens
MPPAVGGPVGYTPPDGGWGWAVVIGAFISIGFSYAFPKSITVFFKEIEGIFHATTSEVSWISSIMLAVMYGGGPISSILVNKYGSRIVMIVGGCLSGCGLIAASFCNTVQQLYVCIGVIGGLGLAFNLNPALTMIGKYFYKRRPLANGLAMAGSPVFLCTLAPLNQVFFGIFGWRGSFLILGGLLLNCCVAGALMRPIGPKPTKAGKDKSKASLEKAGKSGVKKDLHDANTDLIGRHPKQEKRSVFQTINQFLDLTLFTHRGFLLYLSGNVIMFFGLFAPLVFLSSYGKSQHYSSEKSAFLLSILAFVDMVARPSMGLVANTKPIRPRIQYFFAASVVANGVCHMLAPLSTTYVGFCVYAGFFGFAFGWLSSVLFETLMDLVGPQRFSSAVGLVTIVECCPVLLGPPLLGRLNDMYGDYKYTYWACGVVLIISGIYLFIGMGINYRLLAKEQKANEQKKESKEEETSIDVAGKPNEVTKAAESPDQKDTEGGPKEEESPV

SEQ ID NO: 40 - DNA, 3927 bp, Homo sapiens
agagggcgcgcgcggctgaaagcgtgtggaggcgcgggctgcagttcggatgtctgtgtggcggggagggggcggcggccgggagagacgactccgccccctgcgcgcatgctccggccccggcgggttataaggcagcctcgctggcccggccagacaaagtggtgagctgcgacgtgactggctagctgcgtgggtactggaacaagcaaacgaggcagcgagcgaaggacgggagccggaccctgggccccgtggaactccagcctgcgccaccacgtcacgcacacgctcggcgctgcgatccgcgcatataacgatatttggatttgacctgcattttggaatttatctacacttaaaatgccaccagcagttggaggtccagttggatacacccccccagatggaggctggggctgggcagtggtaattggagctttcatttccatcggcttctcttatgcatttcccaaatcaattactgtcttcttcaaagagattgaaggtatattccatgccaccaccagcgaagtgtcatggatatcctccataatgttggctgtcatgtatggtggaggtcctatcagcagtatcctggtgaataaatatggaagtcgtatagtcatgattgttggtggctgcttgtcaggctgtggcttgattgcagcttctttctgtaacaccgtacagcaactatacgtctgtattggagtcattggaggtcttgggcttgccttcaacttgaatccagctctgaccatgattggcaagtatttctacaagaggcgaccattggccaacggactggccatggcaggcagccctgtgttcctctgtactctggcccccctcaatcaggttttcttcggtatctttggatggagaggaagctttctaattcttgggggcttgctactaaactgctgtgttgctggagccctcatgcgaccaatcgggcccaagccaaccaaggcagggaaagataagtctaaagcatcccttgagaaagctggaaaatctggtgtgaaaaaagatctgcatgatgcaaatacagatcttattggaagacaccctaaacaagagaaacgatcagtcttccaaacaattaatcagttcctggacttaaccctattcacccacagaggctttttgctatacctctctggaaatgtgatcatgttttttggactctttgcacctttggtgtttcttagtagttatgggaagagtcagcattattctagtgagaagtctgccttccttctttccattctggcttttgttgacatggtagcccgaccatctatgggacttgtagccaacacaaagccaataagacctcgaattcagtatttctttgcggcttccgttgttgcaaatggagtgtgtcatatgctagcacctttatccactacctatgttggattctgtgtctatgcgggattctttggatttgccttcgggtggctcagctccgtattgtttgaaacattgatggaccttgttggaccccagaggttctccagcgctgtgggattggtgaccattgtggaatgctgtcctgtcctcctggggccaccacttttaggtcggctcaatgacatgtatggagactacaaatacacatactgggcatgtggcgtcgtcctaattatttcaggtatctatctcttcattggcatgggcatcaattatcgacttttggcaaaagaacagaaagcaaacgagcagaaaaaggaaagtaaagaggaagagaccagtatagatgttgctgggaagccaaatgaagttaccaaagcagcagaatctccggaccagaaagacacagatggagggcccaaggaggaggaaagtccagtctgaatccatggggctgaagggtaaattgagcagttcatgacccaggatatctgaaaatattctactggcctgtaatctaccagtggtgctcaatgcaaatagtagacatttgtgtggaaatcataccagttgttcattgatgggatttttgtttgactccttaccaatagcctgaatttgaggagggaatgattggtagcaaaggatgggggaaagaagtaggttctgttttgttttgttttaatcttagcttttaatagtgtcataaagattataatatgtgccttaagttttagtctttagaactctagagagccttaacttcttaaaccatttttgctgaattcatctatttcgagtgttgtgttaaaaggaaaaataacaactaacttgtttgaggcaaatctaaaatttaaaattaatcttgcttcattgttacatgtaatatatttcagacattttcactggaagatttatgaacagaaatattggttgaaagttagagattttacaaaatgctgacaaaaatattttcctagcatcagtagatttctggcatatgtttctgctagctatatatttaggaaattcaaagcataaaactttggcaacatcttggctgttctagacacagtgtacttgtcaacccctctcaggtaccttttcttgggatgcttattagaagccaagtaaagtgcttaaggtttgttttcattaaattagctatttctgctcccctgttcaaagatgcattttgagtgtttatagatcactgccctttttgaaatcacctggtattatttttcttactggaaaagttagtattaaaatctacagaactacatatttgtgcctccttggtaaatacaacacatctaattaaatgtagacagatatttcaaacatcagctgaattcacttaagtttttccaaaacctcagttaaactgtgaagctattggaatttttttttcctggaatttttcccctttgattcacagtggtcccatttatatctgcttctagcttagtgctatgtgtgagatatgtgtgtgtttggtgtttttgtttttttgtttttttttttttaaggtttgcaaattaaaaagggccagaaaaatttggcaccaggcaaacgaataaagataggattgggaaagaagttgctaagtgtgcttagttttaataagtaattccttctcttttttcagagaaggccttacagaaaattgttgtgcttagaattgctggatgcatttttaccctccacacaaacctaaaaattttgtgacccctttcacttacctgaaaagtagagaaatggattcagtataaggataaggagggaaggtggaccagaatgaaaactgtaaatatttttttaacctaatatcacttaaatcgaggcagaaagatacagacattcaatgaattatattcaatgcatttaaaataccactgtaattgacagagtaaaagtatagatacaaaaccttgtgtaagaggctgacttttccaaataaacattttttaagaaaacatttcttctcccaaatgtctattttcttgaggaaaatattgctgtgtcttcattttcattaccaggtttcattttgggccttgctaaattgattgaattaaatcctccagcttttgaaccttgatatttgtgtatatgatttattttcatttgaatttctcctttcctcttctttgctgtaaggcaaggaggaggggaattttaaaaccatcttatttgaactgagagcatccagagcagttaaccttaaggaaacaatgaaaaactccctttgtatgcctgggcatcatggcagatagaggaagagtgttagaggagaaaactgctgctgagagtattggcaggcttggcctcagtttggactctgtaattttctttggacccaagtctgtaacctctgcgtacttcttctctcttaccttctataaaaatgaggattactgttggtgagggaataaggaatgtaagtaaaggaaatctgaaaaaataaaagtaaagcaagtataaaaaaaaaaaaaaaaaaaa

SEQ ID NO: 41 - protein, 478 aa, Homo sapiens [sequence omitted]

SEQ ID NO: 42 - DNA, 1907 bp, Homo sapiens
cgggcgcccaccctgcgccagagaccagataaagatcaatcttaagatgtgatactttcctgtgaaacctgaaacaaggtgatctggggaaccaaagactctgggactcttggtgccaacagagttactctgttacttgaatttccactagaggagcagaaatgccaccaatgccaagtgccccacctgtgcatccacctccagatggaggatggggttggattgtggttggagcaacttttatctccattggattttcctatgcattccccaaagctgtcaccgtattcttcaaagaaattcagcaaatattccacactacctacagtgaaatagcatggatttcatccattatgctggctgttatgtacgcaggaggtcctgtaagtagtgttttggtgaataaatacggcagccggccggtggtgatagcaggaggcttattatgctgtcttggaatggtgttggcctcctttagtagcagcgtggtacagctgtacctcactatgggattcattacaggtttaggtttagccttcaacctgcaacccgccttaaccataattggcaaatacttctataggaagcgacccatggcaaatggattggccatggcaggaaatcctgttttcttaagttcattggctcctttcaatcagtacctttttaatacttttggctggaaaggaagcttcctgattttgggaagtctacttttgaatgcctgtgtggctggttccctcatgagaccccttggacccaatcaaaccacttctaagtctaaaaataagactggcaaaacagaagatgattcaagcccaaagaaaatcaaaacgaagaaatcaacttgggaaaaagttaataagtatttagatttctccctttttaagcatagaggatttctgatatatctgtctggaaatgtcattatgttcctaggtttttttgcccccattatattcccggctccatatgctaaagaccaaggaattgatgagtactcggcagcttttctgctatctgttatggctttcgttgatatgtttgctaggccttctgtaggattaattgcaaactccaaatatattcgacctcgaattcagtacttcttcagttttgcaatcatgttcaatggagtgtgtcacctcttgtgcccactggcacaggactacacaagcctggtattatatgctgtattttttggccttggatttgggagtgttagcagtgttctctttgaaactctcatggacctcgtgggtgcaccaagattttccagtgccgtcggacttgtcacaattgtggagtgtggcccagttcttcttggccctcctcttgcaggtaaattggtggatttaactggagaatataaatacatgtacatgtcctgtggggctattgtggtagcagcaagcgtgtggctgctcattggcaatgctatcaactatagattgcttgcaaaggaaaggaaggaggaaaatgcaaggcagaagaccagagaatctgaacccttgagcaaatctaaacattcggaagatgttaacgtcaaagtttcaaatgcacagagtgtaacctcagaaagagaaactaacatttaacaagaatcacatctctgatttcagtgtttatgactttatctaggagtttgtttttcattttgtttttttaaagtattagaaaaggttttagctgaaatgaggagtcacaattaaggatggaggtgatattttcctcaatggcaattttaaattagtttttaaaaacttacttatttgggtagttaaattttgagattatgcatagaaagaatccatgctataggtttatttccatacctgactctgggtgtggtggttaaaatactaattttaaagtcttccagtgactttcggtcttggttatatgga

SEQ ID NO: 43 - protein, 438 aa, Schizosaccharomyces pombe
MGELKEILKQRYHELLDWNVKAPHVPLSQRLKHFTWSWFACTMATGGVGLIIGSFPFRFYGLNTIGKIVYILQIFLFSLFGSCMLFRFIKYPSTIKDSWNHHLEKLFIATCLLSISTFIDMLAIYAYPDTGEWMVWVIRILYYIYVAVSFIYCVMAFFTIFNNHVYTIETASPAWILPIFPPMICGVIAGAVNSTQPAHQLKNMVIFGILFQGLGFWVYLLLFAVNVLRFFTVGLAKPQDRPGMFMFVGPPAFSGLALINIARGAMGSRPYIFVGANSSEYLGFVSTFMAIFIWGLAAWCYCLAMVSFLAGFFTRAPLKFACGWFAFIFPNVGFVNCTIEIGKMIDSKAFQMFGHIIGVILCIQWILLMYLMVRAFLVNDLCYPGKDEDAHPPPKPNTGVLNPTFPPEKAPASLEKVDTHVTSTGGESDPPSSEHESV

SEQ ID NO: 44 - DNA, 1317 bp, Schizosaccharomyces pombe
atgggtgaactcaaggaaatcttgaaacagaggtatcatgagttgcttgactggaatgtcaaagcccctcatgtccctctcagtcaacgactgaagcattttacatggtcttggtttgcatgtactatggcaactggtggtgttggtttgattattggttctttcccctttcgattttatggtcttaatacaattggcaaaattgtttatattcttcaaatctttttgttttctctctttggatcatgcatgctttttcgctttattaaatatccttcaactatcaaggattcctggaaccatcatttggaaaagcttttcattgctacttgtcttctttcaatatccacgttcatcgacatgcttgccatatacgcctatcctgataccggcgagtggatggtgtgggtcattcgaatcctttattacatttacgttgcagtatcctttatatactgcgtaatggctttttttacaattttcaacaaccatgtatataccattgaaaccgcatctcctgcttggattcttcctattttccctcctatgatttgtggtgtcattgctggcgccgtcaattctacacaacccgctcatcaattaaaaaatatggttatctttggtatcctctttcaaggacttggtttttgggtttatcttttactgtttgccgtcaatgtcttacggttttttactgtaggcctggcaaaaccccaagatcgacctggtatgtttatgtttgtcggtccaccagctttctcaggtttggccttaattaatattgcgcgtggtgctatgggcagtcgcccttatatttttgttggcgccaactcatccgagtatcttggttttgtttctacctttatggctatttttatttggggtcttgctgcttggtgttactgtctcgccatggttagctttttagcgggctttttcactcgagcccctctcaagtttgcttgtggatggtttgcattcattttccccaacgtgggttttgttaattgtaccattgagataggtaaaatgatagattccaaagctttccaaatgtttggacatatcattggggtcattctttgtattcagtggatcctcctaatgtatttaatggtccgtgcgtttctcgtcaatgatctttgctatcctggcaaagacgaagatgcccatcctccaccaaaaccaaatacaggtgtccttaaccctaccttcccacctgaaaaagcacctgcatctttggaaaaagtcgatacacatgtcacatctactggtggtgaatcggatcctcctagtagtgaacatgaaagcgtttaa

SEQ ID NO: 45 - protein, 498 aa, Brassica napus
MEKLREIVREGRRVGEEDPRRIVHSFKVGVALVLVSSFYYYQPFGPFTDYFGINAMWAVMTVVVVFEFSVGATLSKGLNRGVATLVAGGLALGAHQLASLSGRTIEPILLATFVFVTAALATFVRFFPRVKATFDYGMLIFILTFSLISLSQFRDEEILDLAESRLSTVLVGGVSCILISIFVCPVWAGQDLHSLLVSNLDTLSHFLQEFGDEYFEARTYGNIKVVEKRRRNLERYKSVLNSKSDEDSLANFAKWEPPHGKFGFRHPWKQYLVVAALVRQCAHRIDALNSYINSNFQIPIDIKKKLEEPFRRMSLESGKAMKEASISLKKMTKSSSYDIHIINSQSACKALSTLLKSGILNDVEPLQMVSLLTTVSLLNDIVNITEKISESVRELASAARFRNKMKPTEPSVSLKKLDSGSTGCAMPINSRDGDHVVTILLSDDDKDDIDDDDTSNIVLDDDTINEKSEDGEIHVQTSCVREVGMMPEHSLGVRILQI

SEQ ID NO: 46 - DNA, 1497 bp, Brassica napus
atggagaaactgagagagatagtgagagaaggaaggagggtaggagaagaagatccgagaagaatagttcattctttcaaagtaggggttgctcttgttttggtctcttctttctattattaccaacctttcggtccttttacggattacttcggtatcaatgcaatgtgggctgtcatgaccgtcgttgttgtcttcgaattctccgtaggggccacacttagtaaaggactaaatcgaggagtggcaacattagtagcaggaggactagcacttggagctcatcagctagcaagtttgtctggtcgaacaatagagcccattcttctagccacctttgtgtttgtaacggctgcgttagcaacgttcgtgaggttcttcccaagggtgaaggcgacattcgattatgggatgttgatattcatattgacgttctcactgatatcgttgtcccagtttagagacgaagaaatattggatttggcggagagcagactatcaacagtgttggtgggaggagtcagttgcatacttatctctatctttgtctgtcctgtctgggctggacaagaccttcattctcttcttgtctccaacttggacacactctcccacttccttcaagagtttggggatgaatattttgaagccagaacatatgggaacatcaaagtggttgagaagcggagaaggaatcttgagaggtataagagtgttctcaactcaaaaagtgatgaagattctttggctaatttcgcaaaatgggaaccgcctcacggcaaatttggatttaggcatccatggaaacaatatcttgtcgtggctgcattagtcaggcaatgtgcccaccggattgatgctttgaattcatacatcaactcaaattttcagatcccaatcgacataaagaagaagttagaagaaccgtttagaagaatgagcttggagtcaggaaaagcaatgaaagaagcatcaatttcattaaagaaaatgacaaaatcatcttcttatgatattcatatcataaactcacagtctgcatgcaaagctctttccacattactcaaatcaggcatcttgaacgatgttgagcctcttcaaatggtttcattgctgacgacggtctcactactaaacgatattgtcaatataaccgaaaagatctcagaatctgtacgagagcttgcatccgctgcaagattcaggaacaagatgaagccgaccgaaccgagcgtgtcactcaagaagttggattctggaagcactggttgcgccatgccaattaattctcgtgatggcgatcatgttgtcacgatcttattaagtgatgatgataaagatgatattgatgatgatgatacatcaaacattgttcttgatgatgatacaatcaatgaaaaatctgaagacggtgaaatacatgtacaaacgagttgcgtacgtgaggtcgggatgatgccagaacattcattgggtgttcgtatacttcagatttga

SEQ ID NO: 47 - protein, 452 aa, Secale cereale
MDIDHGREIDGEMVSTIASCGLLLHSLLAGFARKVGGAAREDPRRVAHSLKVGLALALVSAVYFVTPLFNGLGVSAIWAVLTVVVVMEFTVGATLSKGLNRALATLVAGCIAVGAHQLAELTERCSDQGEPVMLTVLVFFVASAATFLRFIPEIKAKYDYGVTIFILTFGLVAVSSYRVEELIQLAHQRFYTIVVGVFICLCTTVFLFPVWAGEDVHKLASSNLGKLAQFIEGMETNCFGENNIAINLEGKDFLQVYKSVLNSKATEDSLCTFARWEPRHGQFRFRHPWSQYQKLGTLCRQCASSMEALASYVITTTKTQYPAAANPELSFKVRKTCHEMSTHSAKVLRGLEMAIRTMTVPYLANNTVVVAMKAAERLRSELEDNAALLQVMHMAVTATLLADLVDRVKEITECVDVLARLAHFKNPEDAKYAIVGALTRGIDDPLPDVVIL

SEQ ID NO: 48 - DNA, 3901 bp, Secale cereale
atggatattgatcacggcagagagatcgacggcgagatggtgagcaccatcgccagctgcgggctgctgctccactcgcttctcgccgggttcgcccggaaggtgggcggcgccgcgcgggaggacccgaggcgggtggcgcactcgctcaaggtcggcctggcgctcgcgctggtgtccgccgtctacttcgtcacgccgctcttcaacggcctcggggtctccgcgatatgggccgtgctcaccgtcgtcgtcgtcatggagttcaccgtcggtacgcgcgggcgctcgtaaatgatcagtcacattcataccacataccataaccataccagcatattatgcatgcgcgcagtgtcttctagtctgaaacgcacttgcattgtgttctccgatgccgaaacgtgacaggtgccacgctgagtaaaggcttgaaccgagccttggcgacgctggtggctggctgcatcgccgtcggagctcaccaattagctgaactaactgaacgctgtagtgaccagggagagcccgtaatgctcaccgtgctcgtcttcttcgtgggtacgtagtacacatccgcatggttaattagtacaggtttgctatttcacgtctatagatgtgagtactactgtactacccttccgcttcgagactctctctttttagttactactccttgcataatggtggactggtgttcaacgcagcgtcagcggcgacgttcttgcgcttcatcccggagatcaaagccaagtacgactacggcgtgaccatcttcatactaaccttcggtctggtggccgtgtcgagctaccgagtggaggagctcatccagctcgcgcaccagcggttctacaccatagttgtcggcgtcttcatctgcctctgcaccaccgtcttcctcttccccgtctgggccggtgaggacgtccacaaactcgcctccagcaaccttggcaaactggctcagttcattgaaggtaattaactatcacgtaccaggtcacaacatcaatatacgctaccacttgtttcaaaaagaaaaatcaatatacgctaccacgtgtacagatacattccaacattccatgacagagattcatgcataattatattttctccatattctggtttgactcttgttatcgtaaacttgtctcagtttacaaacgcaacttgatgtgggtgggcctaaatatctgaaatacatagtttgtgtcgtcgagaaaaaagaatagaccatgacaagtcgggagtagcaacagacgccctgagtagcatcgagccttaaaacggcaagccatgcttcaagctaagtcagtatatatggatctaagtgattgccaaacaacgatctctgtcgaagattctcattctaaaggagggtccctatagctagggcgcctctaactaaaatgttcttaggtcagagtcacacaaactacattcgaataacgagctagggttagcacgcgatacaagtaaccaaaggactctgatgatgacgcatggagttcatatccttgggaggaagatgggtatgtaacttgaaatatgtccgctgctggggactttttagtgtggggactttcactgcacacatatctcaacaagaatattattccccttgatcgtatgccattaacatgaaaatccacttggggtacatatgtcctttcttcttgtactggcatatagttatagacactgaggactagatataactatatgcaggaatggaaaccaactgctttggtgaaaataatattgccattaatttggagggaaaggatttcctccaagtgtacaagagcgtccttaattcgaaagccactgaggactctctggtaagcataccccacagactttttatggtacactgttatgtgtttttttttttgaaaaggaggataacccccggccaggacaatgcatacaaccatatacaccaactattatgtagacccttattttagagtaatctactctcttcatttttgtatataaagccactatgaaaaatacattttgcatcaatataaggtcatcaatggtaatcgaggcatatattaaagttgtttcctcgtactagtaatccatagcttaattactagcatgcatgtagtggatgataatgccacactcacctagtactccctccggtcctttttactctacatattaggtttgtctgaagtcaatctcatccaactttgaccaagtttatataaacaattattgatattcacataacaacaccaatatcatcagattcatctcgaaatatattttcatattatatttattagatattatagatgctaataatttctaatataaatttaatcaaacttagcaaagtttgattttcggcaaatccaatgtgcagagtaaaaaggaccggagggagtacttcttctctcacgaccacttaattttctctatgtgcatgcaccctataaattaatccggtaaacgagaaagtaaattagcttgtaaagcacacattaatttttcttcttgataaatgtaatatgagtttgtggctttgtatacaaaaatgaagggagtaatggctcagatattcaactcggtgaataccagcatcaccaccaaactaactagaagtgatacattgctagagtggtgcttgggtggatacaagcgagggcaacctgggctgctgccctaggccgcctaagaacaaaaacccacatatttgcacgtattgttcaacagtgacatcggccaatctagtccagccgcccttgtgcttttgtactgtttatttatatactttttactagtatctgtgagtggaggttgcgagagtataccgcagaaaaatataggccatggagagggggtggtaatcaaaggggattgggatacatggcctatattttttttagtgtctaaattgaggaaattggggaaatggtatatggatctagtgtctatatttttaaagagcgggtgcgggttagggaaattggggaaatggtatatggatctagtctctaagaagttttgtttgtatttaaaacagctttcatatttatttttatttttgtcgactcaaaatgttggtccgaatctggctggcaatcaatatttgatagctacagcaaaaagaacatagcattgcagcattagcatgtgataacctcataacaaaaattgaccaaaaatcttcatcaacaaaatttactcacttgggtaaaaccgtacaaactgcagtgcacctttgccagatgggagcctcgtcatggccagttcagatttcgacacccatggagccaataccagaagttgggaactctttgccgccaatgtgcatcttccatggaagctctagcttcatatgtcatcacaaccacaaaaacccaggtagaactctagcccctaaaaccaccccattttatgttcaaaacaatgccgagacaactgaatgaaataaccgaccaaaactgacatatttgttcatgttgatcatcagtaccctgcagcagccaacccagagttatccttcaaggttcgaaagacatgtcatgaaatgagcacacattccgccaaggtgcttagggggctcgaaatggcaattcgaacaatgactgtgccgtatctagcaaacaataccgtggttgtggccatgaaagcagcggaaaggctcagaagcgagcttgaagataatgcggctttgttgcaagtgatgcacatggcagtcaccgcaacgcttctcgcggacttggttgatcgggtgaaggaaatcacggaatgtgttgatgtcctagcaagactggcacactttaagaaccctgaggatgccaaatatgccattgttggtgccttaactcgagggattgacgatcctttgcctgacgtggttattttgtaa

SEQ ID NO: 49 - protein, 883 aa, Escherichia coli
MNEQYSALRSNVSMLGKVLGETIKDALGEHILERVETIRKLSKSSRAGNDANRQELLTTLQNLSNDELLPVARAFSQFLNLANTAEQYHSISPKGEAASNPEVIARTLRKLKNQPELSEDTIKKAVESLSLELVLTAHPTEITRRTLIHKMVEVNACLKQLDNKDIADYEHNQLMRRLRQLIAQSWHTDEIRKLRPSPVDEAKWGFAVVENSLWQGVPNYLRELNEQLEENLGYKLPVEFVPVRFTSWMGGDRDGNPNVTADITRHVLLLSRWKATDLFLKDIQVLVSELSMVEATPELLALVGEEGAAEPYRYLMKNLRSRLMATQAWLEARLKGEELPKPEGLLTQNEELWEPLYACYQSLQACGMGIIANGDLLDTLRRVKCFGVPLVRIDIRQESTRHTEALGELTRYLGIGDYESWSEADKQAFLIRELNSKRPLLPRNWQPSAETREVLDTCQVIAEAPQGSIAAYVISMAKTPSDVLAVHLLLKEAGIGFAMPVAPLFETLDDLNNANDVMTQLLNIDWYRGLIQGKQMVMIGYSDSAKDAGVMAASWAQYQAQDALIKTCEKAGIELTLFHGRGGSIGRGGAPAHAALLSQPPGSLKGGLRVTEQGEMIRFKYGLPEITVSSLSLYTGAILEANLLPPPEPKESWRRIMDELSVISCDVYRGYVRENKDFVPYFRSATPEQELGKLPLGSRPAKRRPTGGVESLRAIPWIFAWTQNRLMLPAWLGAGTALQKVVEDGKQSELEAMCRDWPFFSTRLGMLEMVFAKADLWLAEYYDQRLVDKALWPLGKELRNLQEEDIKVVLAIANDSHLMADLPWIAESIQLRNIYTDPLNVLQAELLHRSRQAEKEGQEPDPRVEQALMVTIAGIAAGMRNTG

SEQ ID NO: 50 - DNA, 2652 bp, Escherichia coli
atgaacgaacaatattccgcattgcgtagtaatgtcagtatgctcggcaaagtgctgggagaaaccatcaaggatgcgttgggagaacacattcttgaacgcgtagaaactatccgtaagttgtcgaaatcttcacgcgctggcaatgatgctaaccgccaggagttgctcaccaccttacaaaatttgtcgaacgacgagctgctgcccgttgcgcgtgcgtttagtcagttcctgaacctggccaacaccgccgagcaataccacagcatttcgccgaaaggcgaagctgccagcaacccggaagtgatcgcccgcaccctgcgtaaactgaaaaaccagccggaactgagcgaagacaccatcaaaaaagcagtggaatcgctgtcgctggaactggtcctcacggctcacccaaccgaaattacccgtcgtacactgatccacaaaatggtggaagtgaacgcctgtttaaaacagctcgataacaaagatatcgctgactacgaacacaaccagctgatgcgtcgcctgcgccagttgatcgcccagtcatggcataccgatgaaatccgtaagctgcgtccaagcccggtagatgaagccaaatggggctttgccgtagtggaaaacagcctgtggcaaggcgtaccaaattacctgcgcgaactgaacgaacaactggaagagaacctcggctacaaactgcccgtcgaatttgttccggtccgttttacttcgtggatgggcggcgaccgcgacggcaacccgaacgtcactgccgatatcacccgccacgtcctgctactcagccgctggaaagccaccgatttgttcctgaaagatattcaggtgctggtttctgaactgtcgatggttgaagcgacccctgaactgctggcgctggttggcgaagaaggtgccgcagaaccgtatcgctatctgatgaaaaacctgcgttctcgcctgatggcgacacaggcatggctggaagcgcgcctgaaaggcgaagaactgccaaaaccagaaggcctgctgacacaaaacgaagaactgtgggaaccgctctacgcttgctaccagtcacttcaggcgtgtggcatgggtattatcgccaacggcgatctgctcgacaccctgcgccgcgtgaaatgtttcggcgtaccgctggtccgtattgatatccgtcaggagagcacgcgtcataccgaagcgctgggcgagctgacccgctacctcggtatcggcgactacgaaagctggtcagaggccgacaaacaggcgttcctgatccgcgaactgaactccaaacgtccgcttctgccgcgcaactggcaaccaagcgccgaaacgcgcgaagtgctcgatacctgccaggtgattgccgaagcaccgcaaggctccattgccgcctacgtgatctcgatggcgaaaacgccgtccgacgtactggctgtccacctgctgctgaaagaagcgggtatcgggtttgcgatgccggttgctccgctgtttgaaaccctcgatgatctgaacaacgccaacgatgtcatgacccagctgctcaatattgactggtatcgtggcctgattcagggcaaacagatggtgatgattggctattccgactcagcaaaagatgcgggagtgatggcagcttcctgggcgcaatatcaggcacaggatgcattaatcaaaacctgcgaaaaagcgggtattgagctgacgttgttccacggtcgcggcggttccattggtcgcggcggcgcacctgctcatgcggcgctgctgtcacaaccgccaggaagcctgaaaggcggcctgcgcgtaaccgaacagggcgagatgatccgctttaaatatggtctgccagaaatcaccgtcagcagcctgtcgctttataccggggcgattctggaagccaacctgctgccaccgccggagccgaaagagagctggcgtcgcattatggatgaactgtcagtcatctcctgcgatgtctaccgcggctacgtacgtgaaaacaaagattttgtgccttacttccgctccgctacgccggaacaagaactgggcaaactgccgttgggttcacgtccggcgaaacgtcgcccaaccggcggcgtcgagtcactacgcgccattccgtggatcttcgcctggacgcaaaaccgtctgatgctccccgcctggctgggtgcaggtacggcgctgcaaaaagtggtcgaagacggcaaacagagcgagctggaggctatgtgccgcgattggccattcttctcgacgcgtctcggcatgctggagatggtcttcgccaaagcagacctgtggctggcggaatactatgaccaacgcctggtagacaaagcactgtggccgttaggtaaagagttacgcaacctgcaagaagaagacatcaaagtggtgctggcgattgccaacgattcccatctgatggccgatctgccgtggattgcagagtctattcagctacggaatatttacaccgacccgctgaacgtattgcaggccgagttgctgcaccgctcccgccaggcagaaaaagaaggccaggaaccggatcctcgcgtcgaacaagcgttaatggtcactattgccgggattgcggcaggtatgcgtaataccggctaa

SEQ ID NO: 51 - protein, 883 aa, Escherichia coli
MNEQYSALRSNVSMLGKVLGETIKDALGEHILERVETIRKLSKSSRAGNDANRQELLTTLQNLSNDELLPVARAFSQFLNLANTAEQYHSISPKGEAASNPEVIARTLRKLKNQPELSEDTIKKAVESLSLELVLTAHPTEITRRTLIHKMVEVNACLKQLDNKDIADYEHNQLMRRLRQLIAQSWHTDEIRKLRPSPVDEAKWGFAVVENSLWQGVPNYLRELNEQLEENLGYKLPVEFVPVRFTSWMGGDRDGNPNVTADITRHVLLLSRWKATDLFLKDIQVLVSELSMVEATPELLALVGEEGAAEPYRYLMKNLRSRLMATQAWLEARLKGEELPKPEGLLTQNEELWEPLYACYQSLQACGMGIIANGDLLDTLRRVKCFGVPLVRIDIRQESTRHTEALGELTRYLGIGDYESWSEADKQAFLIRELNSKRPLLPRNWQPSAETREVLDTCQVIAEAPQGSIAAYVISMAKTPSDVLAVHLLLKEAGIGFAMPVAPLFETLDDLNNANDVMTQLLNIDWYRGLIQGKQMVMIGYSDSAKDAGVMAASWAQYQAQDALIKTCEKAGIELTLFHGRGGSIGRGGAPAHAALLSQPPGSLKGGLRVTEQGEMIRFSYGLPEITVSSLSLYTGAILEANLLPPPEPKESWRRIMDELSVISCDVYRGYVRENKDFVPYFRSATPEQELGKLPLGSRPAKRRPTGGVESLRAIPWIFAWTQNRLMLPAWLGAGTALQKVVEDGKQSELEAMCRDWPFFSTRLGMLEMVFAKADLWLAEYYDQRLVDKALWPLGKELRNLQEEDIKVVLAIANDSHLMADLPWIAESIQLRNIYTDPLNVLQAELLHRSRQAEKEGQEPDPRVEQALMVTIAGIAAGMRNTG

SEQ ID NO: 52 - skipped

SEQ ID NO: 53 - protein, 883 aa, Escherichia coli
MNEQYSALRSNVSMLGKVLGETIKDALGEHILERVETIRKLSKSSRAGNDANRQELLTTLQNLSNDELLPVARAFSQFLNLANTAEQYHSISPKGEAASNPEVIARTLRKLKNQPELSEDTIKKAVESLSLELVLTAHPTEITRRTLIHKMVEVNACLKQLDNKDIADYEHNQLMRRLRQLIAQSWHTDEIRKLRPSPVDEAKWGFAVVENSLWQGVPNYLRELNEQLEENLGYKLPVEFVPVRFTSWMGGDRDGNPNVTADITRHVLLLSRWKATDLFLKDIQVLVSELSMVEATPELLALVGEEGAAEPYRYLMKNLRSRLMATQAWLEARLKGEELPKPEGLLTQNEELWEPLYACYQSLQACGMGIIANGDLLDTLRRVKCFGVPLVRIDIRQESTRHTEALGELTRYLGIGDYESWSEADKQAFLIRELNSKRPLLPRNWQPSAETREVLDTCQVIAEAPQGSIAAYVISMAKTPSDVLAVHLLLKEAGIGFAMPVAPLFETLDDLNNANDVMTQLLNIDWYRGLIQGKQMVMIGYSDSAKDAGVMAASWAQYQAQDALIKTCEKAGIELTLFHGRGGSIGRGGAPAHAALLSQPPGSLKGGLRVTEQGEMIRFKYGLPEITVSSLSLYTGAILEANLLPPPEPKESWRRIMDELSVISCDVYRGYVRENKDFVPYFRSATPEQELGKLPLGSRPAKRRPTGGVESLRAIPWIFAWTQNRLMLPAWLGAGTALQKVVEDGKQSELEAMCRDWPFFSTRLGMLEMVFAGADLWLAEYYDQRLVDKALWPLGKELRNLQEEDIKVVLAIANDSHLMADLPWIAESIQLRNIYTDPLNVLQAELLHRSRQAEKEGQEPDPRVEQALMVTIAGIAAGMRNTG

SEQ ID NO: 54 - skipped

SEQ ID NO: 55 - protein, 879 aa, Erwinia carotovora
MNEQYSAMRSNVSMLGTLLGDTIKEALGENILDKVETIRKLSKSSRAGNEKHRQELLTTLQNLSNDELLPVARAFSQFLNLTNTAEQYHTISPHGEAASNPAQLSSAFKRLKESKDLSERDIRDAVESLSIELVLTAHPTEITRRTLIHKLVEVNTCLKQLDHNDLADYERNQVMRRLRQLIAQSWHTDEIRKIRPTPVDEAKWGFAVVENSLWEGVPAFLRELDEQLEQAFGYRLPVDAVPVRFTSWMGGDRDGNPNVTAEVTRHVLLLSRWKAADLFLRDIQVLVSELSMSECTPELLELAGGSEVQEPYRAIMKSLRSQLSCTLSYLEARLTGEERLPPKDLLITNEQLWEPLHACYQSLKTCGMGIIADGSLLDTLRRVRCFGVPLVRIDVRQESTRHTDALAEITRYLGLGDYESWSESDKQAFLIRELSSKRPLLPRYWEPSADTKEVLDTCRVIAKAPQGSIAAYVISMARTPSDVLAVQLLLKEAGCPFALPVAPLFETLDDLNNADDVMTQLLSIDWYRGFIQGKQMVMIGYSDSAKDAGVMAASWAQYRAQDALIKTCEKAGIALTLFHGRGGSIGRGGAPAHAALLSQPPGSLKGGLRVTEQGEMIRFKYGLPDVTISSLALYTGAILEANLLPPPEPKQEWHEVMDELSRVSCDMYRGYVRENPDFVPYFRAATPELELGKLPLGSRPAKRRPNGGVESLRAIPWIFAWTQNRLMLPAWLGAGAGLQKVVDDGKQEQLEEMCRNWPFFSTRIGMLEMVFAKADLWLAEYYDQRLVEEKLWPLGKQLRDQLAADINIVLAISNDDHLMADLPWIAESIALRNVYTDPLNVLQAELLHRSRQQKQPDADLELALMVTIAGVAAGMRNTG

SEQ ID NO: 56 - DNA, 2640 bp, Erwinia carotovora
atgaacgaacaatattccgcaatgcgcagtaacgtcagtatgctcggcacactactcggcgataccatcaaggaagcactgggtgaaaacatccttgataaagtcgaaacaatccgcaagttgtcaaaatcatcccgcgcagggaatgaaaaacatcgtcaggagttgctgaccacactgcaaaacctgtctaacgatgaactgttgcccgttgctcgcgcgttcagccaattccttaacctgaccaataccgctgagcaatatcatacgatttcaccgcacggtgaagcggcgagtaacccggcacagctttccagcgcctttaagcgcctgaaagaaagtaaagatctgagcgagcgagatatccgtgatgcagtggaatcgctgtcgatcgagctggtgctgaccgcccaccccaccgagatcacccgtcggacgctgatccacaagctggtagaagtgaatacctgcctcaaacagctcgatcacaacgatctggctgattatgaacgcaatcaggtcatgcgccgtctacgccagttgatcgcacagtcttggcataccgatgagatccgcaaaattcgccctaccccggtagatgaagccaaatggggcttcgccgtagtggaaaatagcctgtgggaaggcgtacccgcatttttacgtgaactggatgaacaactggaacaagctttcggctaccgtctgccggttgacgccgtccccgtacgctttacctcctggatgggcggcgaccgcgacggcaacccaaacgtcacggcagaagtcactcgccatgtgctgttactcagtcgctggaaagccgccgatctgttcctgcgtgatattcaggtgctggtttccgagctgtcgatgtccgaatgtacgccggagctgctggaattagcaggtggcagcgaggttcaggaaccgtaccgtgccataatgaagtcactgcgctcacagttgagctgcacgctgagctatctggaagcacgcctgacgggtgaagaacgtctgccacctaaagacttgctgattaccaacgagcagttgtgggaaccgctccacgcctgctaccagtcgctgaaaacctgcggcatgggcatcattgccgacggtagcctgctggatacgctgcgtcgcgtacgctgtttcggtgtaccgttggtgcgcattgatgtccgtcaggaaagcacccgccacaccgacgcgctggccgaaattacccgctatctgggtctgggcgattatgaaagctggtcagaatccgataagcaggcattcctgatccgtgaactcagctccaaacgcccgctgctgccgcgctactgggaaccgagtgcagataccaaagaagtgctggatacctgtcgggtcattgctaaagcaccacagggttctattgccgcttacgttatttcaatggcgcgtacgccttccgacgtgctggccgttcaactgctgctcaaagaggctggctgcccgtttgctctgcccgtcgcgccgctgtttgaaacgttagacgacctgaacaacgccgatgatgtcatgacgcaattgctaagcatcgactggtatcgcggctttattcagggcaaacagatggtcatgatcggctattccgattcggcaaaagacgcaggcgtgatggccgcatcctgggcacagtaccgtgcacaagacgcgctgatcaaaacctgtgagaaagcgggtatcgcactgacgctgttccacggacgcggtggttccatcggtcgcggtggcgcaccagctcacgccgcgctgttgtcacagccgccgggcagtctgaaaggcggcctgcgcgtgacggaacaaggcgagatgatccgctttaaatacggcctgccggatgtcaccatcagcagtctggcgctgtataccggtgcgattctggaagcgaacctgctgccaccaccggagccaaaacaggaatggcacgaggtgatggatgaactgtcccgcgtgtcctgcgatatgtaccgcggatacgttcgtgaaaacccagatttcgttccttacttccgtgccgctacgccggagctggagctgggtaaactgccgctggggtcacgcccggctaaacgccgtccgaacggcggcgtggaaagcctgcgcgcgatcccgtggattttcgcctggacgcagaaccgtctgatgctaccagcgtggctcggtgccggagctgggctacagaaagtggtcgatgacggcaagcaggagcagttggaagaaatgtgtcgcaactggccgttcttctcgacgcgtatcggcatgctggagatggtgttcgccaaagccgacctatggctggcagagtattacgatcagcgtttggtagaagagaaactgtggccgttaggaaaacagctgcgcgatcagttagccgccgacatcaacattgtgctggcgatctccaatgacgatcacctgatggcagatctgccgtggatcgccgagtcgatcgcactacgtaatgtctacaccgatcccctgaacgtgctgcaggccgaactgctgcatcgttcacgtcagcaaaaacaaccggatgccgacttggagctggcgctgatggtgaccatcgctggcgtcgcagcaggtatgcgtaatacgggctaa

SEQ ID NO: 57 - protein, 1011 aa, Thermosynechococcus vulcanus
MTSVLDVTNRDRLIESESLAARTLQERLRLVEEVLVDVLAAESGQELVDLLRRLGALSSPEGHVLHAPEGELLKVIESLELNEAIRAARAFNLYFQIINIVEQHYEQQYNRERAAQEGLRRRSVMSEPISGVSGEGFPLPHTAANATDVRSGPSERLEHSLYEAIPATQQYGSFAWLFPRLQMLNVPPRHIQKLLDQLDIKLVFTAHPTEIVRQTIRDKQRRVARLLEQLDVLEGASPHLTDWNAQTLRAQLMEEIRLWWRTDELHQFKPEVLDEVEYTLHYFKEVIFAVIPKLYRRLEQSLHETFPALQPPRHRFCRFGSWVGGDRDGNPYVKPEVTWQTACYQRNLVLEEYIKSVERLINLLSLSLHWCDVLPDLLDSLEQDQRQLPSIYEQYAVRYRQEPYRLKLAYVLKRLQNTRDRNRALQTYCIRRNEAEELNNGQFYRHGEEFLAELLLIQRNLKETGLACRELDDLICQVEVFGFNLAALDIRQESTCHAEALNEITAYLGILPCPYTELSEAERTRWLLSELSTRRPLIPGELPFSDRTNEIIETFRMVRQLQQEFGTDLCNTYIISMSHEVSDLLEVLLFAKEAGLFDPATGASTLQAIPLFETVEDLKHAPAVLTQLFSLPFCRSYLGSNSTPFLQEVMLGYSDSNKDSGFLSSNWEIYKAQQQLQKIAESFGFQLRIFHGRGGSVGRGGGPAYAAILAQPAQTIKGRIKITEQGEVLASKYSLPELALFNLETVATAVIQASLLRSSIDEIEPWHEIMEELATRSRQCYRHLIYEQPEFIEFFNEVTPIQEISQLQISSRPTRRGGKKTLESLRAIPWVFSWTQTRFLLPAWYGVGTALKEFLEEKPAEHLSLLRYFYYKWPFFRMVISKVEMTLAKVDLEIARYYVQELSQPQNREAFCRLYDQIAQEYRLTTELVLTITGHERLLDGDPALQRSVQLRNRTIVPLGFLQVSLLKRLRQHNSQTTSGAILRSRYGRGELLRGALLTINGIAAGMRNTG

SEQ ID NO: 58 - DNA, 3241 bp, Thermosynechococcus vulcanus
gtgaattatggcgttcgcgatcgcctgcaacacctggaactgattctgagcagcaaaacagcttagaactgttaacaaatccttaatacgcctgttatcaattgttgtaccgccctggttcaggattgggtaaagtaaggagtattatctttgcaggctggggtaaatatgacatcagtcctcgatgtgaccaatcgcgatcgcttaattgaaagtgaaagtttggcagcccgtaccctacaggaacggttgcgactggtggaagaggtcttggtcgatgtcttggcggcagaatcgggtcaagaattggttgatctattgcggcgcttgggggctctctcttcgccggaaggtcatgtgctccatgccccagaaggggaattgctgaaggttattgaatccctcgaactcaatgaggccattagagcggcccgggcttttaacctctactttcaaattatcaacatcgttgagcagcattacgaacaacaatacaaccgtgaacgcgctgcccaagagggattgcgccgccgcagtgtcatgagtgaaccaatttccggtgtcagtggtgaaggctttccgctgcctcatactgctgccaacgcaacggatgtgcgcagtgggccgagtgaacgcctagagcatagtctctacgaagccattcccgctactcagcagtatggttcctttgcttggctctttcctcggctgcagatgctgaatgtgccgccgcgccatattcaaaagcttttggatcaactggacattaagttggttttcactgctcacccgacggagattgtgcggcaaacgattcgtgataagcagcggcgggttgcccgattacttgagcaactggatgtgctggagggggcttctccacacctaacggattggaacgcccaaactttacgggcacaactgatggaggaaattcgcctctggtggcgcaccgatgagttgcaccaatttaagccggaggtgctcgatgaggtggaatacaccctccactacttcaaggaggtcatttttgctgtcattcccaagctctatcgccgtctggagcagtcattacatgaaacctttcccgcgcttcagcccccccgtcaccgtttctgccgctttggctcttgggtggggggcgatcgcgatggcaatccctatgtcaaaccagaagtaacgtggcaaacggcctgctatcagcgcaacttagttcttgaggagtatattaagtccgttgagcgcttaatcaatttgctcagcctgtccctgcactggtgcgatgtgctgccagatttgctagattcccttgagcaggatcaacggcaactcccgagtatctatgagcagtatgcggtgcgctatcggcaggaaccctaccgcctgaaactggcctatgtgctcaaacggctgcaaaatacccgcgatcgcaaccgggcgctgcaaacctattgcattcgccgcaatgaggcggaagagttaaataatggacagttttaccgccacggtgaagaattcttggcagaactgctgctcattcagcgtaacctcaaggaaacgggattggcctgccgcgaattggatgatttgatttgccaggtggaggtctttggctttaatctagcagccttggatattcgccaagaaagtacctgtcacgctgaggccctcaatgaaattaccgcctatttgggtattctcccctgtccctatacagaactctcagaagccgaacgcacccgctggctcctcagtgaactctcgacccgtcgccccttgattccaggggaactcccctttagcgatcgcaccaatgaaatcattgaaacattccgcatggtgcggcaactccagcaggaatttggcaccgatttgtgcaatacctacatcatcagcatgagccatgaggtcagcgatctgttggaggtactcctctttgctaaggaggcaggcctttttgatccagccactggcgctagtaccctgcaagccattcccctgtttgaaacggtggaggatctcaagcacgccccagcggtgctgacccaactattctctctccccttttgccggagctatcttggaagcaacagtaccccctttctgcaggaggtcatgctgggctattccgacagcaataaggattcgggcttcctcagtagcaactgggaaatttataaggcacaacaacagctgcagaaaattgctgagagttttggcttccaactgcgcattttccacggtcggggtggttcagtgggtcggggtggtggacctgcctatgcggcgattttggcacagccagcacaaacgattaagggacgaatcaagattactgagcagggggaggtactggcttccaaatactcgttgccggaactcgcgctctttaacctcgaaacagtggccacagcggtcatccaagctagtttgctccgcagtagtattgatgagattgagccttggcacgagattatggaggagttggctacgcgatcgcgccagtgctatcgccatctcatctatgagcagccagaattcattgaattctttaacgaagtcaccccaatccaagagattagccaactgcaaattagctcacggccaacacggcggggggggaagaaaacccttgagagcctgcgggcaattccttgggtctttagttggacgcaaacccgtttcctgctgccggcttggtatggcgtgggtactgccctgaaggaattccttgaggaaaaacccgctgagcatctctccctcttgcgctacttctactataagtggcctttcttccgcatggtgatctctaaggttgagatgacccttgccaaggttgatctagagattgcccgctactatgtccaagaactcagccagccccaaaaccgtgaagccttctgccgcctctacgatcagattgctcaggaatatcgcctgaccacggaattagtcctcacgattactggccatgagcggctactcgatggggatccggcgcttcagcgatcggtgcaactgcgcaatcgcaccattgttcctttgggcttcctgcaagtatctcttttgaaacggctgcgccagcacaatagccaaaccacctctggggcaattttgcgctcccgctatggtcggggtgaattgctacggggggcactcttgaccatcaatggcatagcagcggggatgcgcaatacaggctaagcaacggcgagggtgaatcatggacccgacgacccgc

SEQ ID NO: 59 - protein, 919 aa, Corynebacterium glutamicum
MTDFLRDDIRFLGQILGEVIAEQEGQEVYELVEQARLTSFDIAKGNAEMDSLVQVFDGITPAKATPIARAFSHFALLANLAEDLYDEELREQALDAGDTPPDSTLDATWLKLNEGNVGAEAVADVLRNAEVAPVLTAHPTETRRRTVFDAQKWITTHMRERHALQSAEPTARTQSKLDEIEKNIRRRITILWQTALIRVARPRIEDEIEVGLRYYKLSLLEEIPRINRDVAVELRERFGEGVPLKPVVKPGSWIGGDHDGNPYVTAETVEYSTHRAAETVLKYYARQLHSLEHELSLSDRMNKVTPQLLALADAGHNDVPSRVDEPYRRAVHGVRGRILATTAELIGEDAVEGVWFKVFTPYASPEEFLNDALTIDHSLRESKDVLIADDRLSVLISAIESFGFNLYALDLRQNSESYEDVLTELFERAQVTANYRELSEAEKLEVLLKELRSPRPLIPHGSDEYSEVTDRELGIFRTASEAVKKFGPRMVPHCIISMASSVTDVLEPMVLLKEFGLIAANGDNPRGTVDVIPLFETIEDLQAGAGILDELWKIDLYRNYLLQRDNVQEVMLGYSDSNKDGGYFSANWALYDAELQLVELCRSAGVKLRLFHGRGGTVGRGGGPSYDAILAQPRGAVQGSVRITEQGEIISAKYGNPETARRNLEALVSATLEASLLDVSELTDHQRAYDIMSEISELSLKKYASLVHEDQGFIDYFTQSTPLQEIGSLNIGSRPSSRKQTSSVEDLRAIPWVLSWSQSRVMLPGWFGVGTALEQWIGEGEQATQRIAELQTLNESWPFFTSVLDNMAQVMSKAELRLAKLYADLIPDTEVAERVYSVIREEYFLTKKMFCVITGSDDLLDDNPLLARSVQRRYPYLLPLNVIQVEMMRRYRKGDQSEQVSRNIQLTMNGLSTALRNSG

SEQ ID NO: 60 - DNA, 2760 bp, Corynebacterium glutamicum
atgactgattttttacgcgatgacatcaggttcctcggtcaaatcctcggtgaggtaattgcggaacaagaaggccaggaggtttatgaactggtcgaacaagcgcgcctgacttcttttgatatcgccaagggcaacgccgaaatggatagcctggttcaggttttcgacggcattactccagccaaggcaacaccgattgctcgcgcattttcccacttcgctctgctggctaacctggcggaagacctctacgatgaagagcttcgtgaacaggctctcgatgcaggcgacacccctccggacagcactcttgatgccacctggctgaaactcaatgagggcaatgttggcgcagaagctgtggccgatgtgctgcgcaatgctgaggtggcgccggttctgactgcgcacccaactgagactcgccgccgcactgtttttgatgcgcaaaagtggatcaccacccacatgcgtgaacgccacgctttgcagtctgcggagcctaccgctcgtacgcaaagcaagttggatgagatcgagaagaacatccgccgtcgcatcaccattttgtggcagaccgcgttgattcgtgtggcccgcccacgtatcgaggacgagatcgaagtagggctgcgctactacaagctgagccttttggaagagattccacgtatcaaccgtgatgtggctgttgagcttcgtgagcgtttcggcgagggtgttcctttgaagcccgtggtcaagccaggttcctggattggtggagaccacgacggtaacccttatgtcaccgcggaaacagttgagtattccactcaccgcgctgcggaaaccgtgctcaagtactatgcacgccagctgcattccctcgagcatgagctcagcctgtcggaccgcatgaataaggtcaccccgcagctgcttgcgctggcagatgcagggcacaacgacgtgccaagccgcgtggatgagccttatcgacgcgccgtccatggcgttcgcggacgtatcctcgcgacgacggccgagctgatcggcgaggacgccgttgagggcgtgtggttcaaggtctttactccatacgcatctccggaagaattcttaaacgatgcgttgaccattgatcattctctgcgtgaatccaaggacgttctcattgccgatgatcgtttgtctgtgctgatttctgccatcgagagctttggattcaacctttacgcactggatctgcgccaaaactccgaaagctacgaggacgtcctcaccgagcttttcgaacgcgcccaagtcaccgcaaactaccgcgagctgtctgaagcagagaagcttgaggtgctgctgaaggaactgcgcagccctcgtccgctgatcccgcacggttcagatgaatacagcgaggtcaccgaccgcgagctcggcatcttccgcaccgcgtcggaggctgttaagaaattcgggccacggatggtgcctcactgcatcatctccatggcatcatcggtcaccgatgtgctcgagccgatggtgttgctcaaggaattcggactcatcgcagccaacggcgacaacccacgcggcaccgtcgatgtcatcccactgttcgaaaccatcgaagatctccaggccggcgccggaatcctcgacgaactgtggaaaattgatctctaccgcaactacctcctgcagcgcgacaacgtccaggaagtcatgctcggttactccgattccaacaaggatggcggatatttctccgcaaactgggcgctttacgacgcggaactgcagctcgtcgaactatgccgatcagccggggtcaagcttcgcctgttccacggccgtggtggcaccgtcggccgcggtggcggaccttcctacgacgcgattcttgcccagcccaggggggctgtccaaggttccgtgcgcatcaccgagcagggcgagatcatctccgctaagtacggcaaccccgaaaccgcgcgccgaaacctcgaagccctggtctcagccacgcttgaggcatcgcttctcgacgtctccgaactcaccgatcaccaacgcgcgtacgacatcatgagtgagatctctgagctcagcttgaagaagtacgcctccttggtgcacgaggatcaaggcttcatcgattacttcacccagtccacgccgctgcaggagattggatccctcaacatcggatccaggccttcctcacgcaagcagacctcctcggtggaagatttgcgagccatcccatgggtgctcagctggtcacagtctcgtgtcatgctgccaggctggtttggtgtcggaaccgcattagagcagtggattggcgaaggggagcaggccacccaacgcattgccgagctgcaaacactcaatgagtcctggccatttttcacctcagtgttggataacatggctcaggtgatgtccaaggcagagctgcgtttggcaaagctctacgcagacctgatcccagatacggaagtagccgagcgagtctattccgtcatccgcgaggagtacttcctgaccaagaagatgttctgcgtaatcaccggctctgatgatctgcttgatgacaacccacttctcgcacgctctgtccagcgccgatacccctacctgcttccactcaacgtgatccaggtagagatgatgcgacgctaccgaaaaggcgaccaaagcgagcaagtgtcccgcaacattcagctgaccatgaacggtctttccactgcgctgcgcaactccggctag

SEQ ID NO: 61 - protein, 1178 aa, Saccharomyces cerevisiae
MSQRKFAGLRDNFNLLGEKNKILVANRGEIPIRIFRTAHELSMQTVAIYSHEDRLSTHKQKADEAYVIGEVGQYTPVGAYLAIDEIISIAQKHQVDFIHPGYGFLSENSEFADKVVKAGITWIGPPAEVIDSVGDKVSARNLAAKANVPTVPGTPGPIETVEEALDFVNEYGYPVIIKAAFGGGGRGMRVVREGDDVADAFQRATSEARTAFGNGTCFVERFLDKPKHIEVQLLADNHGNVVHLFERDCSVQRRHQKVVEVAPAKTLPREVRDAILTDAVKLAKECGYRNAGTAEFLVDNQNRHYFIEINPRIQVEHTITEEITGIDIVAAQIQIAAGASLPQLGLFQDKITTRGFAIQCRITTEDPAKNFQPDTGRIEVYRSAGGNGVRLDGGNAYAGTIISPHYDSMLVKCSCSGSTYEIVRRKMIRALIEFRIRGVKTNIPFLLTLLTNPVFIEGTYWTTFIDDTPQLFQMVSSQNRAQKLLHYLADVAVNGSSIKGQIGLPKLKSNPSVPHLHDAQGNVINVTKSAPPSGWRQVLLEKGPAEFARQVRQFNGTLLMDTTWRDAHQSLLATRVRTHDLATIAPTTAHALAGRFALECWGGATFDVAMRFLHEDPWERLRKLRSLVPNIPFQMLLRGANGVAYSSLPDNAIDHFVKQAKDNGVDIFRVFDALNDLEQLKVGVDAVKKAGGVVEATVCFSGDMLQPGKKYNLDYYLEIAEKIVQMGTHILGIKDMAGTMKPAAAKLLIGSLRAKYPDLPIHVHTHDSAGTAVASMTACALAGADVVDVAINSMSGLTSQPSINALLASLEGNIDTGINVEHVRELDAYWAEMRLLYSCFEADLKGPDPEVYQHEIPGGQLTNLLFQAQQLGLGEQWAETKRAYREANYLLGDIVKVTPTSKVVGDLAQFMVSNKLTSDDVRRLANSLDFPDSVMDFFEGLIGQPYGGFPEPFRSDVLRNKRRKLTCRPGLELEPFDLEKIREDLQNRFGDVDECDVASYNMYPRVYEDFQKMRETYGDLSVLPTRSFLSPLETDEEIEVVIEQGKTLIIKLQAVGDLNKKTGEREVYFDLNGEMRKIRVADRSQKVETVTKSKADMHDPLHIGAPMAGVIVEVKVHKGSLIKKGQPVAVLSAMKMEMIISSPSDGQVKEVFVSDGENVDSSDLLVLLEDQVPVETKA

SEQ ID NO: 62 - DNA, 4201 bp, Saccharomyces cerevisiae
ccgcccaatgtcgcgggttgacccgcgacattgggcgggcaatactctcatcttattggctattcaacttagacaacggccagttgcgcgcacaaatttggtcatgaccgctccaccggcatgcgtgtcgtcatcccgcatcattcgggacattttggccttttccgcagtgcgtagttgacgtggggagaaagctagtgggctgtcgcatatggttggttttaggtggcgaaagtttcgccgcgatagcaatcatgtcctcgaccttaatctcaatggaatgggtcatgctcggtaagtgagtctcgctgtatataagtatatatgtaatcgcctagttcgatagatacaaggaggtcttgagtatgtagataaacgaaaagaagataacaaaaggaaaatctcagcctctccccttcctcttagacaatgtcgcaaagaaaattcgccggcttgagagataacttcaatctcttgggtgaaaagaacaaaatattggtggctaatagaggagaaattccaatcagaatttttcgtaccgctcatgaactgtctatgcagacggtagctatatattctcatgaagatcgtctttcaacgcacaaacaaaaggctgacgaagcatacgtcataggtgaagtaggccaatatacccccgtcggcgcttatttggccattgacgaaatcatttccattgcccaaaaacaccaggtagatttcatccatccaggttatgggttcttgtctgaaaattcggaatttgccgacaaagtagtgaaggccggtatcacttggattggccctccagctgaagttattgactccgtgggtgataaggtctcagctagaaacctggcagcaaaagctaatgtgcccaccgttcctggtacaccaggtcctatagaaactgtagaggaagcacttgacttcgtcaatgaatacggctacccggtgatcattaaggccgcctttggtggtggtggtagaggtatgagagtcgttagagaaggtgacgacgtggcagatgcctttcaacgtgctacctccgaagcccgtactgccttcggtaatggtacctgctttgtggaaagattcttggacaagccaaagcatattgaagttcaattgttggccgataaccacggaaacgtggttcatcttttcgaaagagactgttccgtgcagagaagacaccaaaaggttgtcgaagtggccccagcaaagactttaccccgtgaagtccgtgacgccattttgacagatgcagttaaattggccaaagagtgtggctacagaaatgcgggtactgctgaattcttggttgataaccaaaatagacactatttcattgaaattaatccaagaatccaagtggaacataccatcacagaagaaattaccggtatagatattgtggcggctcagatccaaattgcggcaggtgcctctctaccccagctgggcctattccaggacaaaattacgactcgtggctttgccattcagtgccgtattaccacggaagaccctgctaagaacttccaaccagataccggtagaatagaagtgtaccgttctgcaggtggtaatggtgttagactggatggtggtaacgcctatgcaggaacaataatctcacctcattacgactcaatgctggtcaaatgctcatgctccggttccacctacgaaatcgttcgtagaaaaatgattcgtgcattaatcgagttcagaattagaggtgtcaagaccaacattcccttcctattgactcttttgaccaatccagtatttattgagggtacatactggacgacttttattgacgacaccccacaactgttccaaatggtttcatcacaaaacagagcccaaaaacttttacattacctcgccgacgtggcagtcaatggttcatctatcaagggtcaaattggcttgccaaaattaaaatcaaatccaagtgtcccccatttgcacgatgctcagggcaatgtcatcaacgttacaaagtctgcaccaccatccggatggaggcaagtgctactagaaaaggggccagctgaatttgccagacaagttagacagttcaatggtactttattgatggacaccacctggagagacgctcatcaatctctacttgcaacaagagtcagaacccacgatttggctacaatcgctccaacaaccgcacatgcccttgcaggtcgtttcgccttagaatgttggggtggtgccacattcgatgttgcaatgagatttttgcatgaggatccatgggaacgtttgagaaaattaagatctctggtgcctaatattccattccaaatgttattgcgtggtgccaatggtgtggcttattcttcattgcctgacaatgctattgaccatttcgtcaagcaagccaaggataatggtgttgatatatttagagtctttgatgccttaaatgacttggaacaattgaaggtcggtgtagatgctgtgaagaaggcaggtggtgttgtagaagccactgtttgtttctctggggatatgcttcagccaggcaagaaatacaatttggattactacttggaaattgctgaaaaaattgtccaaatgggcactcatatcctgggtatcaaagatatggcaggtaccatgaagccagcagctgccaaactactgattggatctttgagggctaagtaccctgatctcccaatacatgttcacactcacgattctgcaggtactgctgttgcatcaatgactgcgtgtgctctggcgggcgccgatgtcgttgatgttgccatcaactcaatgtctggtttaacttcacaaccatcaatcaatgctctgttggcttcattagaaggtaatattgacactggtattaacgttgagcatgtccgtgaactagatgcatattgggcagagatgagattgttatactcttgtttcgaggctgacttgaagggcccagatccagaagtttatcaacatgaaatcccaggtggtcaattgacaaacttgttgtttcaagcccaacaattgggtcttggagaacaatgggccgaaacaaaaagagcttacagagaagccaattatttattgggtgatattgtcaaagttaccccaacttcgaaggtcgttggtgatctggcacaatttatggtctccaataaattaacttccgatgatgtgagacgcctggctaattctttggatttccctgactctgttatggatttcttcgaaggcttaatcggccaaccatatggtgggttcccagaaccatttagatcagacgttttaaggaacaagagaagaaagttgacttgtcgtccaggcctggaactagagccatttgatctcgaaaaaattagagaagacttgcagaatagatttggtgatgttgatgagtgcgacgttgcttcttataacatgtacccaagagtttatgaagacttccaaaagatgagagaaacgtatggtgatttatctgtattgccaacaagaagctttttgtctccactagagactgacgaagaaattgaagttgtaatcgaacaaggtaaaacgctaattatcaagctacaggctgtgggtgatttgaacaaaaagaccggtgaaagagaagtttactttgatttgaatggtgaaatgagaaaaattcgtgttgctgacagatcacaaaaagtggaaactgttactaaatccaaagcagacatgcatgatccattacacattggtgcaccaatggcaggtgtcattgttgaagttaaagttcataaaggatcactaataaagaagggccaacctgtagccgtattaagcgccatgaaaatggaaatgattatatcttctccatccgatggacaagttaaagaagtgtttgtctctgatggtgaaaatgtggactcttctgatttattagttctattagaagaccaagttcctgttgaaactaaggcatgaaccggttagttctcatttataatgtataatatacccgaatcttatttatttacctttcctattttttgacgaccagtaaatactaatacataattaggaacaaaagttaaataaaaaaaaaaataataatttaacgcatccaattaacgtgtccttttttcatcattaatttatctactatttcgatttaaattccatatacaataaatcctagatacattcccgaaagcatctt

SEQ ID NO: 63 - protein, 1180 aa, Saccharomyces cerevisiae
MSSSKKLAGLRDNFSLLGEKNKILVANRGEIPIRIFRSAHELSMRTIAIYSHEDRLSMHRLKADEAYVIGEEGQYTPVGAYLAMDEIIEIAKKHKVDFIHPGYGFLSENSEFADKVVKAGITWIGPPAEVIDSVGDKVSARHLAARANVPTVPGTPGPIETVQEALDFVNEYGYPVIIKAAFGGGGRGMRVVREGDDVADAFQRATSEARTAFGNGTCFVERFLDKPKHIEVQLLADNHGNVVHLFERDCSVQRRHQKVVEVAPAKTLPREVRDAILTDAVKLAKVCGYRNAGTAEFLVDNQNRHYFIEINPRIQVEHTITEEITGIDIVSAQIQIAAGATLTQLGLLQDKITTRGFSIQCRITTEDPSKNFQPDTGRLEVYRSAGGNGVRLDGGNAYAGATISPHYDSMLVKCSCSGSTYEIVRRKMIRALIEFRIRGVKTNIPFLLTLLTNPVFIEGTYWTTFIDDTPQLFQMVSSQNRAQKLLHYLADLAVNGSSIKGQIGLPKLKSNPSVPHLHDAQGNVINVTKSAPPSGWRQVLLEKGPSEFAKQVRQFNGTLLMDTTWRDAHQSLLATRVRTHDLATIAPTTAHALAGAFALECWGGATFDVAMRFLHEDPWERLRKLRSLVPNIPFQMLLRGANGVAYSSLPDNAIDHFVKQAKDNGVDIFRVFDALNDLEQLKVGVNAVKKAGGVVEATVCYSGDMLQPGKKYNLDYYLEVVEKIVQMGTHILGIKDMAGTMKPAAAKLLIGSLRTRYPDLPIHVHSHDSAGTAVASMTACALAGADVVDVAINSMSGLTSQPSINALLASLEGNIDTGINVEHVRELDAYWAEMRLLYSCFEADLKGPDPEVYQHEIPGGQLTNLLFQAQQLGLGEQWAETKRAYREANYLLGDIVKVTPTSKVVGDLAQFMVSNKLTSDDIRRLANSLDFPDSVMDFFEGLIGQPYGGFPEPLRSDVLRNKRRKLTCRPGLELEPFDLEKIREDLQNRFGDIDECDVASYNMYPRVYEDFQKIRETYGDLSVLPTKNFLAPAEPDEEIEVTIEQGKTLIIKLQAVGDLNKKTGQREVYFELNGELRKIRVADKSQNIQSVAKPKADVHDTHQIGAPMAGVIIEVKVHKGSLVKKGESIAVLSAMKMEMVVSSPADGQVKDVFIKDGESVDASDLLVVLEEETLPPSQKK

SEQ ID NO: 64 - DNA, 4112 bp, Saccharomyces cerevisiae
taaatacccgggcgctggaatggtctaagaagaaaacctacagtcgatcaaaaatcccgtacgatattaaatagagtagttaacgtacttgagcgttataaactcacattttcactcaagaagaaaatggagaatggagacatggtaagtgaaagcattaaggaagaaacacagttagcacgtatttcatcgaaagtgtttgattactttctatttggcatttaaatatacatgggaacataactagataaaatatacgccatatatagtacagctagtattttcagatgtcataaaatataattaacgagtaaaaattactttttttgggatgggggtagggtttcttcttctaggacaaccaacaaatctgatgcgtcaacactttcaccatccttaatgaaaacgtctttaacttgaccatctgctggtgaagagacaaccatttccattttcatggcactcaaaacagcaatcgattcgccctttttcaccaaagaccctttatgtactttaacttctatgataacaccagccattggtgcaccgatttggtgagtatcgtggacatcagcctttggtttagcaacagattgtatgttttgtgacttgtctgcaactctgatctttcttaattcaccgttcaattcaaaatacacttctctttgcccagttttcttatttaagtcaccaacagcttgcaatttgataatcaaagtcttaccttgttcgatggtgacttcgatttcttcatcaggttctgctggtgctaggaaatttttggttggtagaactgataaatcaccgtatgtttctctgatcttttggaaatcttcatagacccttggatacatattgtaagaagcaacatcgcattcatcaatatcaccgaatctgttctgcaagtcttctctaattttttcgagatcaaatggttctaattctaaacctggacggcacgtcaactttcttctcttgtttctcaatacatcagatcttaatggttctgggaacccaccgtatggttgaccaattaaaccttcaaaaaagtccataacagagtcaggaaagtccaaagaattagctaaacgtctaatatcgtcggaagtcagtttgttagaaaccatgaattgagctaaatcaccgacaaccttagaagttggggtaactttaacaatatctcccagtaggtaattggcttctctgtaagctcttttagtttcagcccattgttcaccaagacccagttgttgagcttggaataacaagttagtcaattgaccacctgggatttcatgttggtaaacttctggatctggtcccttcaagtcggcctcgaaacaagaatacaacagtctcatttcggcccagtatgcatctaattcacgaacatgctcaacgttaatcccagtatcaatgttaccttctaatgaagccaacagtgcattaattgatggttgggaagttaagcccgacattgaattgatagctacatcgacaacatcagcacctgctagggcacatgcagtcatagacgcaacagcagtacctgcggagtcatgactgtgaacatgaattggtaaatccggatatctggttcttagggagccaattaataatttggcagcggccggtttcatagtacctgccatatccttaatacccaagatatgtgtacccatttgaactattttttcaacaacttctaggtagtagtctaagttgtatttcttacctggctgaagcatgtcaccagagtaacaaacagtagcttcgacaacaccaccggccttcttgacagcattcacaccaacttttaattgttctaaatcattcaaggcatcaaaaactctaaatatatcaacaccattatccttggcttgcttgacaaaatggtcaatagcattgtcaggtaatgaagagtaagccacaccgttggcaccacgtaataacatttggaatggaatattaggcaccagagatcttaattttctcagacgttcccatggatcctcatgcaagaatctcattgcaacgtcgaatgtagcaccaccccaacattctaaagcgaaagcacctgcaagggcatgtgcggttgttggagcgattgtagccaaatcgtgggttctgactcttgttgcaagtagagattgatgagcgtctctccaggtggtgtccatcagtagagtaccattgaactgtctgacttgcttggcaaattcagatggtcccttttccagtagcacttgtctccatccggatggtggtgcagactttgtaacgttgatgacattgccctgagcatcgtgcaaatgggggacacttggatttgattttagttttggcaagccaatttgacccttaatagaagaaccgttaactgccaagtctgccaaatagtgtaacagtttttgcgctctgttttgtgacgataccatttggaacagttgtggggtgtcgtcaataaaagtcgtccagtatgtaccctcaataaaaactggattggtcaaaagagtcaataggaagggaatgttggtcttaacacctctgattctgaattcgatcagggcacgaatcatcttcctacggacgatttcataagtagaaccagagcatgaacatttgaccagcattgagtcgtagtgaggcgagatagtagcacctgcataagcgttaccaccgtccaatctcacaccattaccaccggcagaacgatagacctccaggcgaccggtatccggttggaaattcttagagggatcttcagtggtaatacgacattggatggaaaacccacgggtggtgattttatcctgtaatagacctagttgagtcaaagtggcacctgcggcaatctggatttgggcagaaacaatgtcaataccggtgatttcttcagtgatggtatgctccacttgaattcttggattaatttcaatgaaatagtgtctgttttggttgtcaaccaagaattcggcggtacctgcgtttctgtaaccacataccttagctaatttaacagcatctgtcaaaatagcgtcacgaacttcacggggcaaagtctttgctggagcgacttcgacaactttttggtgtcttctttgcacagaacagtctctttcgaaaagatgaaccacgtttccgtggttatcagccaacaattgaacttcaatatgctttggcttgtccaagaatctttccacaaagcaggtaccattaccgaaggcagtacgggcttcggaggtagcacgttgaaaggcatctgccacgtcgtcaccttctctaacgactctcatacctctaccaccaccaccaaaggcggccttaatgatcaccgggtagccgtattcattaacgaagtcaagtgcctcttgcacagtttcgataggtcctggagtaccgggaacggtaggaacgttagctcttgctgccaagtgtctggcagagactttgtcacccacagagtcaataacttcagctggagggccgatccaagtgataccggccttcactactttgtcggcaaattccgaattttcagacaagaacccataacctggatggatgaaatccaccttatgcttctttgcaatttcgatgatctcgtccattgccaagtaagcacccacaggtgtatactggccctcctccccgataacatacgcttcgtccgccttcaacctgtgcattgaaagacggtcctcatgggagtatatggcgatggttctcatagacagctcatgagcagatctaaaaattctaatcggaatttcacctctattggcgaccaagatcttattcttttcgccgagcaaactgaaattgtccctaagaccggccaatttcttgctactgctcatattttattttgttctctatgtcccttattttctctcctagtaactgtcctttattttgcaatatagtaattggcaaaaaaatcaaactcaaatgacgggccacagatagtaagctacaagagtttggaagaaaagaggggcttgtttatgtatgtaatcaagtaaggataccgaaagtaagagaaaagaaaaaaggactaaaaatcacagaaacacaataggaaatatccgatggggagtacttcttactta

SEQ ID NO: 65 - protein, 1185 aa, Saccharomyces cerevisiae
MSSSKKLAGLRDNFCLLGEKNKILVANRGEIPIRIFRSAHELSMRTIAIYSHEDRLSMHRLKADEAYVIGEEGQYTPVGAYLAMDEIIEIAKKHKVDFIHPGYGFLSENSEFADKVVKAGITWIGPPAEVIESVGDKVSARHLAARANVPTVPGTPGPIETVQEALDFVNEYGYPVIIKAAFGGGGRGMRVVREGDDVADAFQRATSEARTAFGNGTCFVERFLDKPKHIEVQLLADKHGNVVHLFERDCSVQRRHQKVVEVAPAKTFPREVRDAILTDAVKLAKVCGYRNAGTAEFLVDNQNRHYFIEINPRIQVEHTITEEITGIDIVSAQIQIAAGATLTQLGLLQDKITTRGFSIQCRITTEDPSKNFQPDTGRLEVYRSAGGNGVRLDGGNAYAGATISPHYDSMLVKCSCSGSTYEIVRRKMIRALIEFRIRGVKTNIPFLLTLLTNPVFIEGTYWTTFIDDTPQLFQMVSSQNRAQKLLHYLADLAVNGSSIKGQIGLPKLKSNPSVPHLHDAQGNVINVTKSAPPSGWRQVLLEKGPCEFAKQVRQFNGTLLMDTTWRDAHQSLLATRVRTHDLATIAPTTAHALAGAFALECWGGATFDVAMRFLHEDPWERLRKLRSLVPNIPFQMLLRGATGVAYSSLPDNAIDHFVKQAKDNGVDIFRVFDALNDLEQLKVGVNAVKKAGGVVEATVCYSGDMLQPGKKYNLDYYLEVVEKIVQMGTHILGIKDMAGTMKPAAAKLLIGSLRTRYPDLPIHVHSHDSASTRVASMTACALAGADVVDVAINSMSGLTSQPSINALLASLEGNIDTGINVEHVRELDAYRAEMRLLYPCFEADLKGPDPEVYQHEIPGGQLTNLLFQAQQLGLGEQWAETKRAYREANYLLGDIVKVTPTSKVVGDLAQFMVSNKLTSDDIRRLANSLDFPDSVMDFFEGLIGQPYGGFPEPLRSDVLRNKRRKLTCRPGLELEPFDLEKIREDLQNRFGDIDECDVASNNMYPRVYEDFQKIRETYGDLSVLPTKNFLAPAEPDEEIEVTIEQGKTLIIKLQAVGDLNKKTGQREVYFELNGELRKIRVADKSQNIQSVAKPKADVHDTHQIGAPMAGVIIEVKVHKGSLVKKGESIAVLSAMKMEMVVSSPADGQVKDVFIRDGESVDASDLLVVLEEETLPPSPKKVIFTR

SEQ ID NO: 66 - DNA, 5704 bp, Saccharomyces cerevisiae
gaattcctctgatttcgccaataagtatttcagaaacatcccactggatcacgggttcattagtcttggtgggtacatgaagttctcgggcatgctttacattgtaataaccatatatatcatcttttgcaccaaggaaaaaccctacgtagagtatttgcccaaagtggagcccataaatacaagtgacagagggtcaaagccgataagtattgagtatgacgacggtgatgtggtgtcaactcagaatacaagcagtataaagtacatttaccgctgctttataaaagtgttgaaattgaagtccgtaagaagcctagccttcattcacatgattttcgaaatttgcctttcaatgcaacgaagccgccacaaacctgaaactactagagcaaggcttcaaaagagaagacttggctgtgacagtactcatagacctgccgttcgaaatcatatttgggtactatgttgttaaatggagctccgacaaggaccccatgattcgtgacaatagaagattaagaaacagcacgggcaccaacaaggtcatcaagttcttagttggggatgccggcgttttaacaccatggttatggggcttcttgttccgtctggcagccgcagtcttgggaagttacgtggtgaagcaatttcccaaggatggtgaaatatccacgggttatttttgtctcgtgatatccagcacctcttaggttccttcatgaataccgtccagttcattggaatatcggccttccatacaagagttgcagaccccgtgctgggtggcacatatatgacactgttaaataccctcagcaacttcggtgggacatggccgcggttaatcattatgtccatgatcaactacttcaccgtgtatagtgcactattcctggcacaaataaagtatacgtaactcacggcggcacgatgcaagcgtgcaccgagcttttgaatggcaccgtgaccatcctgcgtgacggctattacatcaccaatctcatatgtattgtagtcggacttttcctatattttggatatttgaaaaggaaaatcctccatttacaaagtctgccaatcagttcctggagatgtacgtaacgacccctcaaacaagaattgtacgacattacattcaagaaaattttaacgaggtatcgtaatatttacaaaatctttttagctactacaggaagcagaaacaaaatgagatatcaataccagtgtaaatctgttaatgagaatcatcacattatcccagttttttccatgcaagggaaaaatatactacacgacatttctatactttaattatcaattaaggtcatctttctgtacgaaaactaactacgattgtcactaacgacgtgtcccttacccgacgcagctgctgatagctaccgcacagcacagccagctcttctgtgattggcagagaggggtccttcctgcggaagacgccgcaaaggcacatatgactaacctttttttttcgcaattaattttctaatagtttttcatttttttttttacaattttggcagttacgtctcgagctatttattataagagtcagaattggcgcagggagtgttaagtaagaagtactccccatcggatatttcctattgtgtttctgtgatttttagtctttttttcttttcttctttctttcggtatccttacttgattacatacataaacaagcccctcttttcttccaaactcttgtagcttactatcgtggcccgtacatttgagtttgatttttttgccaattactatattgcaaaataaaggacagttactaggagagaaaataagagacatagagaacaaagtaaaatatgagcagtagcaagaaattggccggtcttagggacaatttctgtttgctcggcgaaaagaataagatcttggtcgccaatagaggtgaaattccgattagaatttttagatctgctcatgagctgtctatgagaactatcgccatatactcccacgaggaccgtctttcaatgcataggttgaaggcggacgaagcgtatgttatcggggaggagggccagtatacacctgtgggtgcttacttggcaatggacgagatcatcgaaattgcaaagaagcataaggtggatttcatccatccaggttatgggttcttgtctgaaaattcggaatttgccgacaaagtagtgaaggccggtatcacttggattggccctccagctgaagttattgaatctgtgggtgataaggtctctgccagacacttggcagcaagagctaacgttcctaccgttcccggtaccccaggacctatcgaaactgtgcaagaggcacttgacttcgttaatgaatacggctacccggtgatcattaaggccgcctttggtggtggtggtagaggtatgagagtcgttagagaaggtgacgacgtggcagatgcctttcaacgtgctacctccgaagcccgtactgccttcggtaatggtacctgctttgtggaaagattcttggacaagccaaagcatattgaagttcaattgttggctgataaacacggaaacgtggttcatcttttcgaaagagactgttctgtgcaaagaagacaccaaaaagttgtcgaagtcgctccagcaaagactttcccccgtgaagttcgtgacgctattttgacagatgctgttaaattagctaaggtatgtggttacagaaacgcaggtaccgccgaattcttggttgacaaccaaaacagacactatttcattgaaattaatccaagaattcaagtggagcataccatcactgaagaaatcaccggtattgacattgtttctgcccaaatccagattgccgcaggtgccactttgactcaactaggtctattacaggataaaatcaccacccgtggtttttccatccaatgtcgtattaccactgaagatccctctaagaatttccaaccggataccggtcgcctggaggtctatcgttctgccggtggtaatggtgtgagattggacggtggtaacgcttatgcaggtgctactatctcgcctcactacgactcaatgctggtcaaatgttcatgctctggttctacttatgaaatcgtccgtaggaagatgattcgtgccctgatcgaattcagaatcagaggtgtgaagaccaacattcccttcctattgactcttttgaccaatccagtttttattgagggtacttactggacgacttttattgacgacaccccacaactgttccaaatggtatcatcacaaaacagagcgcaaaaactgttacactatttggcagacttggcagttaacggttcttctattaagggtcaaattggcttgccaaaactaaaatcaaatccaagtgtcccccatttgcacgatgctcagggcaatgtcatcaacgttacaaagtctgcaccaccatccggatggagacaagtgctactggaaaagggaccatgtgaatttgccaagcaagtcagacagttcaatggtactctactgatggacaccacctggagagacgctcatcaatctctacttgcaacaagagtcagaacccacgatttggctacaatcgctccaacaaccgcacatgcccttgcaggggctttcgctttagaatgttggggtggtgcgacattcgacgttgcaatgagattcttgcatgaggatccatgggaacgtctgagaaaattaagatctctggtgcctaatattccattccaaatgttattgcgtggtgccactggtgtggcttactcttcattacctgacaatgctattgaccattttgtcaagcaagccaaggataatggtgttgatatatttagagtctttgatgccttgaatgatttagaacaattaaaagttggtgtgaatgctgtcaagaaggccggtggtgttgtcgaagctactgtttgttactctggtgacatgcttcagccaggtaagaaatacaacttagattactacctagaagttgttgaaaaaatagttcaaatgggtacacatatcttgggtattaaggatatggcaggtactatgaaaccggccgctgccaaattattaattggctccctaagaaccagatatccggatttaccaattcatgttcacagtcatgactccgcaagtactcgtgttgcgtctatgactgcatgtgccctagcaggtgctgatgttgtcgatgtagctatcaattcaatgtcgggcttaacttcccaaccatcaattaatgcactgttggcttcattagaaggtaacattgatactgggattaacgttgagcatgtccgtgaattagatgcatatagggccgaaatgagactgttgtatccttgtttcgaggccgacttgaagggcccagatccagaagtttaccaacatgaaatcccaggtggtcaattgactaacttgttattccaagctcaacaactgggtcttggtgaacaatgggctgaaactaaaagagcttacagagaagccaattacctactgggagatattgttaaagttaccccaacttctaaggttgtcggtgatttagctcaattcatggtttctaacaaactgacttccgacgatattagacgtttagctaattctttggactttcctgactctgttatggacttttttgaaggtttaattggtcaaccatacggtgggttcccagaaccattaagatctgatgtattgagaaacaagagaagaaagttgacgtgccgtccaggtttagaattagaaccatttgatctcgaaaaaattagagaagacttgcagaacagattcggtgatattgatgaatgcgatgttgcttctaacaatatgtatccaagggtctatgaagatttccaaaagatcagagaaacatacggtgatttatcagttctaccaaccaaaaatttcctagcaccagcagaacctgatgaagaaatcgaagtcaccatcgaacaaggtaagactttgattatcaaattgcaagctgttggtgacttaaataagaaaactgggcaaagagaagtgtattttgaattgaacggtgaattaagaaagatcagagttgcagacaagtcacaaaacatacaatctgttgctaaaccaaaggctgatgtccacgatactcaccaaatcggtgcaccaatggctggtgttatcatagaagttaaagtacataaagggtctttggtgaagaagggcgaatcgattgctgttttgagtgccatgaaaatggaaatggttgtctcttcaccagcagatggtcaagttaaagatgttttcattagggatggtgaaagtgttgacgcatcagatttgttggttgtcctagaagaagaaaccctacccccatccccaaaaaaagtaatttttactcgttaattatattttatgacatctgaaaatactagctgtactatatatggcgtatattttatctagttatgttccatgtatatttaaatgccaaatagaaagtaatcaaacactttcgatgaaatacgtgctaactgtgtttcttccttaatgctttcacttaccatgtctccattctccattttcttcttgagtgaaaatgtgagtttataacgctcaagtacgttaactactctatttaatatcgtacgggatttttgatcgactgtaggttttcttcttagaccattccagcgcccggg

SEQ ID NO: 67 - protein, 1191 aa, Yarrowia lipolytica
MSNVPETKVDPSLSTPEVPSQGLHSRLDKMRADSSILGSMNKILVANRGEIPIRIFRTAHELSMQTVAIYAHEDRLSMHRFKADEAYVIGDRGKYTPVQAYLQVDEIIEIAKAHGVNMVHPGYGFLSENSEFARKVEEAGMAWIGPPHNVIDSVGDKVSARNLAIKNNVPVVPGTDGPVEDPKDALKFVEKYGYPVIIKAAFGGGGRGMRVVREGDDIVDAFNRASSEAKTAFGNGTCFIERFLDKPKHIEVQLLADGQGNVVHLFERDCSVQRRHQKVVEIAPAKDLPVEVRDAILDDAVRLAEDAKYRNAGTAEFLVDEQNRHYFIEINPRIQVEHTITEEITGIDIVAAQIQIAAGATLEQLGLTQDKISTRGFAIQCRITTEDPAKQFQPDTGKIEVYRSAGGNGVRLDGGNGFAGAIISPHYDSMLVKCSCSGTTFEIARRKMIRALVEFRIRGVKTNIPFLLALLTHPTFIEGKCWTTFIDDTPSLFDLMTSQNRAQKLLAYLADLCVNGTSIKGQVGNPKLKSEVVIPVLKNSEGKIVDCSKPDPVGWRNILVEQGPEAFAKAVRKNDGVLVMDTTWRDAHQSLLATRVRTTDLLAIANETSHAMSGAFALECWGGATFDVAMRFLYEDPWDRLRKMRKAVPNIPFQMLLRGANGVAYSSLPDNAIDHFVKQAKDNGVDIFRVFDALNDLDQLKVGVDAVKKAGGVVEATVCYSGDMLNPKKKYNLEYYLDFVDRVVEMGTHILGIKDMAGTLKPAAATKLIGAIREKYPNLPIHVHTHDSAGTGVASMAAAAEAGADVVDVASNSMSGMTSQPSISALMATLEGKLSTGLDPALVRELDAYWAQMRLLYSCFEADLKGPDPEVFQHEIPGGQLTNLLFQAQQVGLGEQWKETKQAYIAANQLLGDIVKVTPTSKVVGDLAQFMVSNKLSYDDVIKQAGSLDFPGSVLDFFEGLMGQPYGGFPEPLRTEALRGQRKKLTERPGKSLPPVDFAAVRKDLEERFGHITECDIASYCMYPKVFEDYRKIVDKYGDLSIVPTRLFLEAPKTDEEFSVEIEQGKTLILALRAIGDLSMQTGLREVYFELNGEMRKISVEDKKAAVETVSRPKADPGNPNEVGAPMAGVVVEVRVHEGTEVKKGDPVAVLSAMKMEMVISAPVSGKVGEVPVKEGDSVDGSDLICKIVRA

SEQ ID NO: 68 - DNA, 4326 bp, Yarrowia lipolytica
aagttccgttcagtccggggtaaggtttcagacaaggaagtggccctaaaagcaaaagtgcggtacgaactcaatcccaccctgcccaattcatgctgcatagagttggcatgatagtggtagggtttatataaatattgctatctccccatcccacaccacggtatcgcacaccatgtccaacgttcctgagaccaaggtggatccctcgctctcgacgcccgaggtgccctcgcagggccttcacagccgcctcgacaagatgcgagccgattccagtattctgggctccatgaacaagattctgggtgagtacaaacgagtgagatagtgtgtgtgtgtgtcacctgtcgacctgttgagatgacgacacgcaccctcaattgctctcaaaagtgaagcgaaaccaacaacacgaagatgggaaaaattggcactaccacactactggtgtgggggtcacatgcaactgcgaatgtcaccatgcacgttgctcggtactctgcataaggtgacaccacgacacagaggatgcttccgccacccagagtgctcccaaagaacaaccctaacacagtcgccaaccgaggagagatccccattcgaatcttcagaaccgcccatgagctttccatgcagaccgtggctatctacgcccacgaggatcggctctctatgcaccgattcaaggccgacgaggcctatgtgattggtgaccgtggcaagtacacccccgtccaggcctaccttcaggtcgacgagatcatcgagatcgcaaaggctcacggtgtcaacatggtccaccccggatacggtttcctttccgagaactccgagtttgctcgaaaggttgaggaggccggcatggcctggattggcccccctcacaacgtcattgactctgtcggtgacaaggtctctgcccgaaacctggccattaagaacaacgttcccgttgtgcccggtactgatggccctgtcgaggaccccaaggacgctctcaagtttgtggagaagtacggttaccctgttatcatcaaggctgcctttggtggtggaggccgaggtatgcgagttgttcgagaaggagacgacattgttgatgcattcaaccgagcctcctccgaggccaagactgcatttggcaacggaacctgtttcatcgagcgattcctcgataaacccaagcacattgaggtccagcttcttgctgacggccagggcaacgttgtacatctgtttgagcgagactgttccgtccagcgacgacaccagaaggtggttgagattgctcctgccaaggacctgcccgtggaggttcgagacgccattcttgacgacgctgtccgacttgctgaggacgccaagtaccgaaacgccggtaccgccgagttcctcgttgacgagcagaaccgacactacttcatcgagatcaacccccgaattcaggttgagcacacaattaccgaagagattactggcatcgacattgttgctgcacagatccagattgccgctggtgccactcttgagcagctgggactcacccaggacaagatctccactcgaggctttgccatccaatgccgaatcacaaccgaggaccctgccaagcagttccaacccgacaccggtaagatcgaggtctaccgatctgctggaggtaacggagttcggctcgatggaggaaacggttttgccggagccatcatctcccctcactacgattccatgctggtcaagtgctcttgttccggcaccacattcgagattgctcgacgaaagatgatccgagctctggttgagttccgaatccgaggagtcaagaccaacattcccttcctgttggctcttctcacccaccccactttcatcgagggtaagtgctggaccacttttatcgacgacactccttcgctgttcgacctcatgacctcccagaaccgagcccagaagctgcttgcctaccttgccgatctctgtgtcaacggcacttccatcaagggccaggttggcaaccccaagctcaagtccgaggttgtcatccccgtgctcaagaactctgagggcaagattgtcgactgttccaagcccgaccctgttggctggagaaacattcttgtcgagcagggccccgaggcctttgccaaggccgttcgaaagaacgacggtgtgcttgtcatggacaccacttggcgtgacgcccaccagtctctgcttgccacccgagttcgaaccaccgatctgctggctatcgccaacgagacctcccacgccatgtccggtgcttttgccttggagtgctggggaggagccaccttcgatgtcgccatgcggttcctgtacgaggacccctgggaccgacttcgaaagatgcgaaaggccgtgcccaacatccccttccagatgcttctgcgaggtgccaatggtgtcgcttactcctctctacctgataacgccattgaccactttgtcaagcaggccaaggataatggagtcgacattttccgagtgtttgacgctctcaacgatctcgaccagctcaaggtcggtgttgacgctgtcaagaaggccggaggagtggttgaggccaccgtttgctactccggagacatgctcaaccccaagaagaagtacaacctcgagtactacctcgattttgtcgatcgtgtggttgagatgggcactcacattctgggtatcaaggatatggctggtactcttaagcccgccgctgctaccaagctcattggtgccattcgagagaagtaccccaacctccccatccatgtccacacacatgactctgctggtactggtgtggcctccatggctgctgccgccgaggctggagctgatgtggttgacgtggcttccaactccatgtctggtatgacctctcagccctccatctctgctctcatggctactcttgagggcaagctttccactggcctggaccctgctcttgtccgagagctcgacgcgtactgggcccagatgcgactgctgtactcctgcttcgaggctgatctcaagggtcccgatcccgaggtgttccagcacgagattcctggtggccagctgaccaaccttctcttccaggcccagcaggttggtctgggagagcagtggaaggagaccaagcaggcttacatcgctgccaaccagctgctgggcgatattgttaaggtaacccctacctcgaaggttgtcggtgatctggcccagtttatggtttccaacaagctgtcatatgatgacgtcatcaaacaggctggctctctggacttccccggttccgtgctcgacttcttcgagggtctcatgggccagccctacggtggtttccctgagcctctccgaactgaggctctgcgaggccagcgaaagaagctgaccgagcgacccggtaagtctctgccccctgttgactttgctgccgtccgaaaggacctcgaggaacgatttggccacatcactgagtgcgacattgcctcttactgcatgtaccccaaggtgtttgaggactaccgaaagattgtcgacaaatacggtgatctatccatcgtccctactcgactcttcctggaggctcccaagactgacgaggagttctctgtcgagattgagcagggtaagactctgattctcgctctgcgagccattggagacctgtccatgcagactggtctacgagaggtctactttgagctcaacggagagatgcgaaagatttctgttgaggacaagaaggctgctgtcgagactgtttctcgacctaaggccgaccctggcaaccccaacgaggtcggagctcccatggccggtgtggttgtggaggtccgagtccacgagggcaccgaggtcaagaagggcgaccccgtggctgttctgtctgccatgaagatggagatggttatctctgcccctgtttccggtaaggtgggcgaggttcctgtgaaggagggcgactctgtcgatggttccgatcttatttgcaagattgtgcgggcttaattatcaaaaatagatagttaattgatttatgattttattgaaacaccgagtttctacttgtaatgtagcttttagcgtgtatatattgtcttttttatttttttatttgctccttcattataatatgttcttgagtaagctcccatgtgtaacatcacagatacttctagtttacttgattatcttgacagcgtaacgcgccacaaattaaggttcggtatatgtaaacaccaagagccctcattgtaacacccacttcacacatctaagacactgaaatggacacggcatctctcacgaacgagc

SEQ ID NO: 69 - protein, 1192 aa, Aspergillus niger
MAAPRQPEEAVDDTEFIDDHHDQHRDSVHTRLRANSAIMQFQKILVANRGEIPIRIFRTAHELSLQTVAVYSHEDRLSMHRQKADEAYMIGKRGQYTPVGAYLAIDEIVKIALEHGVHLIHPGYGFLSENAEFARKVEQSGMVFVGPTPQTIESLGDKVSARQLAIRCDVPVVPGTPGPVERYEEVKAFTDTYGFPIIIKAAFGGGGRGMRVVRDQAELRDSFERATSEARSAFGNGTVFVERFLDRPKHIEVQLLGDNHGNVVHLFERDCSVQRRHQKVVEIAPAKDLPADVRDRILADAVKLAKSVNYRNAGTAEFLVDQQNRYYFIEINPRIQVEHTITEEITGIDIVAAQIQIAAGATLEQLGLTQDRISTRGFAIQCRITTEDPSKGFSPDTGKIEVYRSAGGNGVRLDGGNGFAGAIITPHYDSMLVKCTCRGSTYEIARRKVVRALVEFRIRGVKTNIPFLTSLLSHPVFVDGTCWTTFIDDTPELFALVGSQNRAQKLLAYLGDVAVNGSSIKGQIGEPKLKGDIIKPVLHDAAGKPLDVSVPATKGWKQILDSEGPEAFARAVRANKGCLIMDTTWRDAHQSLLATRVRTIDLLNIAHETSHALANAYSLECWGGATFDVAMRFLYEDPWDRLRKLRKAVPNIPFQMLLRGANGVAYSSLPDNAIYHFCKQAKKCGVDIFRVFDALNDVDQLEVGIKAVHAAEGVVEATICYSGDMLNPSKKYNLPYYLDLVDKVVQFKPHVLGIKDMAGVLKPQAARLLIGSIRERYPDLPIHVHTHDSAGTGVASMIACAQAGADAVDAATDSLSGMTSQPSIGAILASLEGTEHDPGLNSAQVRALDTYWAQLRLLYSPFEAGLTGPDPEVYEHEIPGGQLTNLIFQASQLGLGQQWAETKKAYESANDLLGDVVKVTPTSKVVGDLAQFMVSNKLTAEDVIARAGELDFPGSVLEFLEGLMGQPYGGFPEPLRSRALRDRRKLDKRPGLYLEPLDLAKIKSQIRENYGAATEYDVASYAMYPKVFEDYKKFVAKFGDLSVLPTRYFLAKPEIGEEFHVELEKGKVLILKLLAIGPLSEQTGQREVFYEVNGEVRQVSVDDKKASVENTARPKAELGDSSQVGAPMSGVVVEIRVHDGLEVKKGDPIAVLSAMKMEMVISAPHSGKVSSLLVKEGDSVDGQDLVCKIVKA

SEQ ID NO: 70 - DNA, 6513 bp, Aspergillus niger
agaaccggagatgtgaggcccggtgtgagatttagggaaggcaagtcttgtcccggcggtgggattttctgcacgccaggtcatgggaaccggtggaagccaggctatcgatggagtcggccatccactccggcctggtttcacttttatatgggtaatgtaatcccttccctactcgatggggaaattacctccccagacgagcggacaaggcacagttagtctacgtagccgacgtgcgtttccctcgctatctaaactactcgggacaggcgggatgcaaatagttccagcttggccgaggtagatcataggaacgttgggtgatcgtctaggagaattgtaagaattatgagcttggcccggagataccatccaccgaagcacctcgcatcgatggccattgtgcgacgatcgcagaagttgccaagctgatagatgcgttttggttgagggctgaatcggtggaaagagggcacgatgcatggctcggtcacaaagtatggacaccgggctggactggctggggctggcgtgctcgctcggatgattcttgccagcttctggatgaagatccccgtcgcctatcgccggagatacggtggggaaggcctgggttttggttcgtttactgacggctacatgatatcagggcaggagagtccgatgttgctgggtaaccttgacgagacgtctttcccgagcttggaacgctccatgagattttccaggcatgaattagcccgagcacccgaggtaagcaagagaatgcgatgcctgaaccacccgatgcattttcggtataggtgggatagtgaatgatggagaatgtgtgagagtgtgaatggtagctacactacatagcgtgcagcccgtaagaaaagccatcgtcgccgccagctattcacgcggaaaactgtccattgaccgagcgtccatggcgatgatccaactgcgaatggacgacaccccaccaaactgtaatctttctgacagccaatgaatccggacgaacggaggcactgcaaccctacccaagagaagcaaaaaaagagcagaagtctaatggaacgaggcaggtcgactggccgagcatgacattccatgggtcaccatcccacatgctgcagcccggtgtgccggtgaaggtcgagcttctgggggggcgtccactagcgccgtcatgaaattaccgactgccctccggactggagccactttactatggccatagcataccgtccagggcccagcggtgtaatctgattacagtaccgcctgccaatcgtgccgcagcgtcatcgcccgtccgggatcccctcctccgccttgcgctgacctgcccctccgctcctctgctctggcttgccgggcagccgctggagagggtcatcatccccaagtacttctatgccctcctctcctcctccttcccccctcttcttcctttcccaactttctcatctcattactctctgtccatctctctctccctcctcacgttcatccccctcttgaggtcctccccctcctcctcatcctcctttttccgtcgggtaagtcgccggatccctccaattgagtttcctaatcctcccacgatttccccgcgctttcccacgctttcccgttccgaaaccgggcctttttcttccccggaagcaccttctccccaggtgactcacgccaacgtatcactgctccgttttctggcttgctttttttcttccgagcgtcattggatcatccggctaactcgtatactatatttcccttcatccccagctcctgcgccttctctctctcttctctagatcctccttcaatagctctccatctccttgcccatactctagctccccctccccctcctcaccctcccacccttatccatccttatcaacaaacacaccccgcccgccatggctgctccccgccagcccgaggaggcggtcgatgacaccgagttcatcgatgaccaccatgaccagcaccgggactctgtccacacccgtctgcgtgccaattcggctatcatgcagttccaaaagatccttgttgccaaccgtggtgaaatccccattcgtatcttccggacggctcacgagctgtccctgcagaccgtcgccgtctactcccatgaggaccatctctccatgcaccgtcagaaggccgacgaggcctacatgattggcaagcgcggtcaatatacaccggttggggcctacttggccattgacgagatcgtcaagattgctctggagcatggtgtacacctgatccacccgggttacggtttcctgtccgagaacgccgagtttgcccgcaaggtggagcagtccggcatggttttcgtcggccctaccccccagaccatcgagagcctcggtgacaaggtctccgcccgtcagctggctatccgctgcgacgtgcccgtcgtgcccggtaccccgggccctgtcgagcgctacgaggaggtcaaggccttcaccgacacctacggcttccccatcatcatcaaggccgcctttggtggtggtggtcgtggtatgcgtgtcgttcgcgaccaggccgaactgcgtgactccttcgagcgtgccacctccgaggcccgctctgcctttggcaacggcaccgtcttcgtcgagcgcttcctcgaccgccccaagcacatcgaagtccagctgctgggtgacaaccacggcaacgtcgtccacctgttcgagcgtgactgctccgtccagcgtcgccaccagaaggtcgttgaaattgccccggccaaggacctgcctgccgatgtccgtgaccgcatcctggctgatgctgtcaagctggccaagtcggtcaactaccgcaacgccggtactgcagagttcctggttgaccagcagaaccgttactacttcattgagatcaacccccgtatccaggtcgagcacactatcaccgaagagatcacgggtatcgatatcgttgctgctcagatccagattgcggccggtgctaccctggaacagctgggtctgacccaggaccgcatctccactcgtggattcgccattcagtgccgtatcaccaccgaggacccctccaagggcttctcccccgacaccggtaagatcgaggtctaccgctccgccggtggtaacggtgtccgtctggatggtggaaacggtttcgccggtgccatcatcacccctcactacgactccatgttggtcaagtgtacctgccgtggttccacctatgagatcgctcgccgcaaggtcgttcgtgctttggtcgagttccgtatccgtggtgtcaagaccaacattcctttcctcacctctcttctgagtcaccctgtgttcgtggatggtacctgctggaccacgttcattgatgacactcccgagctgttcgcccttgtcggcagtcagaaccgtgcccagaagctgctggcttacctgggtgatgtggctgtcaacggcagcagcatcaagggccagatcggcgagcccaagctcaagggcgatatcatcaagcccgttctgcatgacgctgccggcaagcccctcgacgtctctgtccccgccaccaagggatggaagcagatcctggacagtgagggtcccgaggcttttgcccgcgctgtgcgtgccaacaagggctgcttgatcatggatactacctggcgtgatgcccaccagtcgctgctggccactcgtgtgcgtaccattgacctcctgaacatcgcccacgagacgagccacgccctcgccaacgcctacagtttggaatgctggggtggtgccaccttcgatgtcgccatgcgcttcctgtacgaggacccctgggaccgtcttcgcaagctgcgcaaggccgttcccaacatccccttccagatgttgctccgtggtgccaacggtgttgcttactcctccctccctgacaacgccatctaccacttctgtaagcaggccaagaagtgcggtgtcgacatcttccgtgtcttcgatgctctcaacgacgttgaccagctcgaggtcggtatcaaggctgtccacgctgccgagggtgttgttgaggctactatttgctacagtggtgatatgctcaaccccagcaagaagtacaacctgccttactacctcgaccttgttgataaggtggtccaattcaagccccacgtcttgggtatcaaggacatggctggtgtgctgaagccccaggctgctcgtctgctgatcggttccatccgcgagcgctaccccgacctccccatccacgtgcacacccacgattctgctggtaccggtgtggcttccatgattgcttgcgctcaggccggtgctgatgccgttgatgctgccacggacagcctttccggtatgacctcccagcccagcattggtgctatcctcgcttccctcgagggaactgagcacgaccccggcctcaactcggcccaggttcgcgcccttgacacctactgggcgcagctgcgtctcctctactcgcccttcgaggcaggtctgactggtcccgaccccgaggtttacgagcatgagatccctggtggtcaattgaccaacctgatcttccaggccagccagcttggtctgggccagcagtgggcggagacgaagaaggcttacgagtctgccaacgatcttttgggcgatgtcgtcaaggtcacccccacttccaaggtggtcggtgatttggctcagttcatggtctccaacaagttgactgctgaagatgtgattgctcgcgccggcgagcttgacttccccggttccgttctggagttcctcgagggtctcatgggccagccctacggtggattccccgagcctctgcgctctcgcgctctgcgtgaccgtcgcaagctcgacaagcgccctggtctgtacctggagccccttgacctggccaagatcaagagccagatccgggagaactatggcgcagctaccgagtacgatgtggccagctatgccatgtaccccaaggtcttcgaggattacaagaagtttgtcgccaagttcggtgatttgtccgtcctgcccacgcgttacttcttggccaagcccgagatcggcgaggaattccacgtcgagctggagaagggtaaggtgctgatcctgaagttgttggccattggtcccctctccgagcagaccggccagcgtgaggtcttctacgaagtcaacggtgaggttcgccaggttagtgtggacgacaagaaggcgtccgtcgagaacaccgcccgccccaaggccgagctgggtgacagcagccaggttggtgctcctatgagcggtgtggttgtcgagatccgcgtccacgacggcctggaagtcaagaagggtgaccccattgccgtcctgagcgccatgaagatggtatgtataaccccaaaaactatcaatcaaaactcctgaccggctgctaacatctattaggaaatggttatctctgctccccacagtggcaaggtctccagcttgctggtcaaggaaggtgactcggtggatggccaggatcttgtctgcaagatcgtcaaggcctagaagagtaacaccgttatgacggcaatgtttgaaaagctaatgtcgatgttgatgtccttgcaaccggcttatttgtcaacaaggacactatgccaatattctttttctagattagagcgtctgttatgtttatgaatattttgggttgggtttgggttatttccatatttatgccacagcttatttacgatcaatggttgccacggacatacaatgtcaaccatatgaatgacaagtgatttcaaaacattctttcagatatattcgtagtatctaggagacacagcatatatagtcatgatggatatgtacaggatcaagaccaacctccatttattcagaagtattgaatctcttctcccctagagcttcgcagcagaagcttccggctctcccacctcccgtaaagccttccagacgcgcatcgcctcatcccaaggcgcagtatcctgcacaatctcaaccgacccatcaggcttcagggtcctcatctcccgatgatgcctcgtaccccacttcacatcctccaccccatgaacaaagctaataaacggatcaataagagcccgccgaataaaacctttctcctccggctccagtacattcccattcccccaaaaccaaatcggataatcactagaatgcgtaacctcccactccggcggaacactcgcatccgcacacttagctcggtactcaatcctataccgataaagcaagtgtcccgccccgccactagcaagagcatgaatcagcccgcgctgcatatcatgcacctgcatcttggcatatacccggccgaaagcatcattgtcccaattctcgcagcacggcggcaacttgccgtccgggtagtggagcttcatgagcgtgtcaacgacgtggcgggggtagtctgcgagaagtctggaatggagagcggagagcgtgtcggcttgcggcgggaaccagg

SEQ ID NO: 71 - protein, 1128 aa, Nocardia sp.
MFSKVLVANRGEIAIRAFRAAYELGARTVAVFPYEDRWSEHRLKADEAYEIGERGHPVRAYLDPEAIVAVAIRAGADAVYPGYGFLSENPALAEACANAGITFVGPTADVLTLTGNKARAIAAATAAGVPTLASVEPSTDVDALVESAGELPYPLFVKAVAGGGGRGMRRVDAPGQLREAVETCMREAEGAFGDPTVFIEQAVVDPRHIEVQVLADGEGHVMHLFERDCSVQRRHQKVIEIAPAPNLDPELRDRICADAVRFAKEIGYRNAGTVEFLLDAKGTYHFIEMNPRIQVEHTVTEEVTDVDLVQSQLRIASGETLADLGLSQETVTLRGAALQCRITTEDPANNFRPDTGVITTYRSPGGGGVRLDGGTVYTGAEVSAHFDSMLAKLTCRGRTFEKAVEKARRAVAEFRIRGVSTNIPFLQAVLVDPDFSSGHVTTSFIETHPQLLQARSSGDRGSRLLHYLADVTVNQPHGPAPVSIDPVTKLPEVNLDVPAPDGTRQLLLDVGPEEFARRLRAQTGVAVTDTTFRDAHQSLLATRVRTRDLLAVAGHVARTTPQLWSLEAWGGATYDVALRFLAEDPWERLAALRQAVPNICLQMLLRGRNTVGYTPYPADVTQAFVEEAAATGIDVFRIFDALNDVEQMRPAIEAVRATGTAVAEVALCYTGDLSDPDETLYTLDYYLELADRIVDAGAHVLAIKDMAGLLRVPAARTLVTALRDRFDLPVHLHTHDTPGGQLATLLAAIDAGVDAVDAATASMAGTTSQPPLSALVSATDHGPRETGLSLGAVSALEPYWEATRRVYAPFESGLPSPTGRVYRHEIPGGQLSNLRQQAIALGLGEKFEQIEDMYAAANDILGNVVKVTPSSKVVGDLALHLVAVGADPTEFADEPGKFDIPDSVIGFLNGELGDPPGGWPEPFRTKALAGRTHKPPVEELDDEQREGLAGSSPTRRRTLNELLFPGPTKEFTESRLRYGDTSVLPTLDYLYGLRRGEEHAVEIEEGKTLILGVQAITEPDERGFRTVMTTINGQLRPVSVRDRSVAAEVAAAEKADTSKPGHVAAPFQGVVSIVVEEGQQVAAGDTVATIEAMKMEASITAPVAGTVERLALSGTQAVEGGDLVLVLS

SEQ ID NO: 72 - DNA, 3387 bp, Nocardia sp.
atgttctccaaggtcctggtcgccaaccgcggcgagatcgcgatccgggcgttccgcgccgcctacgagctcggcgcgcgcacggtggccgtcttcccgtacgaggaccgctggtccgagcaccggctcaaggccgacgaggcctacgagatcggtgagcgcggccacccggtacgcgcctacctcgaccccgaggcgatcgtcgcggtcgcgatccgcgccggcgcggacgccgtctaccccgggtacggcttcctctcggagaaccccgccctcgcggaggcgtgcgcgaacgccggcatcaccttcgtcggcccgaccgccgacgtgctcacgctgaccggcaacaaggcccgggcgatcgcggcggcgacggccgcgggggtcccgaccctcgccagcgtcgagccgtccaccgatgtcgacgcgctggtggagtccgccggggagctgccgtacccgctgttcgtgaaggccgtcgccgggggcggcggccggggcatgcggcgcgtggacgcgcccgggcagctgcgcgaggcggtcgagacctgcatgcgtgaggccgagggcgcgttcggcgacccgacggtcttcatcgagcaggccgtggtcgacccgcgccacatcgaggtgcaggtcctcgccgacggcgagggccacgtgatgcacctcttcgagcgcgactgctcggtgcagcggcgccaccagaaggtcatcgagatcgcgcccgcacccaatctcgaccccgagctgcgggaccggatctgcgcggacgccgtgcgcttcgcgaaggagatcggctaccgcaacgccggcaccgtcgagttcctgctggacgccaagggcacctaccacttcatcgagatgaacccccgcatccaggtggagcacaccgtgaccgaggaggtcaccgacgtcgacctcgtgcagtcccagctgcggatcgcgtccggcgagacgctggcggacctcgggctctcccaggagaccgtgaccctgcgcggggcggcgctccagtgccggatcaccaccgaggacccggccaacaacttccgccccgacaccggggtgatcaccacctaccgctcccccggcggcggcggcgtccgcctcgacgggggcaccgtgtacaccggcgccgaggtgtccgcccacttcgactcgatgctggccaagctcacctgtcggggccgcacgttcgagaaggcggtcgagaaggcccgccgggcggtcgccgagttccggatccggggcgtctccacgaacatcccgttcctccaggcggtgctggtcgacccggacttctcctcgggccacgtcaccacctccttcatcgagacccacccacagctgctgcaggcgcggagctcgggcgaccgcggcagcaggctgctgcactacctcgccgacgtgaccgtgaaccagccgcacggccccgcgccggtgagcatcgacccggtgaccaagctgccggaggtcaacctcgacgtcccggccccggacggcacccgccagctgctgctcgacgtcggtcccgaggagttcgcgcgccggctgcgcgcgcagaccggcgtcgcggtcaccgacaccacgttccgcgacgctcaccagagcctgctcgccacccgggtccgcacccgcgacctgctcgcggtcgccggccacgtcgcgcgcaccacaccacagctgtggtcgctcgaggcctggggcggcgcgacctacgacgtcgccctgcggttcctcgccgaggacccgtgggagcggctggccgcgctgcgccaggcggtcccgaacatctgcctccagatgctgctgcgcggccgcaacacggtcgggtacacgccgtaccccgccgacgtcacccaggccttcgtcgaggaggcggcggccaccggcatcgacgtcttccggatcttcgacgccctcaacgacgtcgagcagatgcgcccggcgatcgaggcggtgcgggcgaccggcacggccgtcgccgaggtcgccctctgctacaccggcgacctctccgacccggacgagacgctctacacgctcgactactacctcgagctcgccgaccggatcgtcgacgccggggcacatgtgctggcgatcaaggacatggccggcctgctgcgggtgcccgccgcgcgcacgctggtcaccgcgctgcgcgaccggttcgacctgcccgtgcacctgcatacccacgacaccccgggcggccagctcgccaccctgctcgcggcgatcgacgcaggcgtcgacgcggtcgacgccgcgaccgcgtcgatggcggggacgacctcgcagccgccgctctcggcgctggtctcggcaaccgaccacgggccgcgggagaccgggctctcactcggcgcggtctccgcgctcgagccgtactgggaggcgacccgccgcgtctacgcgccgttcgagtccggcctgccctcgccgaccgggcgggtctaccgccacgagatccccggcggtcagctctccaacctgcgccagcaggcgatcgcgctcggcctcggggagaagttcgagcagatcgaggacatgtacgccgccgccaacgacatcctcggcaacgtcgtcaaggtgaccccgtcctcgaaggtcgtcggcgacctggcgctgcacctggtcgcggtgggcgccgacccgaccgagttcgccgacgagcccgggaagttcgacatcccggactcggtgatcgggttcctcaacggcgagctcggcgaccccccgggcggctggcccgagccgttccgcaccaaggcgctcgccggccgcacccacaagccgccggtggaggagctcgacgacgagcagcgcgagggcctcgccgggagcagcccgacccgtcgccgtaccctcaacgagctgctgttccccggtcccaccaaggagttcaccgagtcgcggctgcggtacggcgacacctcggtgctgccgaccctggactacctctacgggctgcggcgcggcgaggagcatgcggtcgagatcgaggagggcaagaccctgatcctcggcgtgcaggcgatcaccgagcccgacgagcgtggcttccggaccgtgatgaccacgatcaacgggcagctccgcccggtcagcgtccgcgatcggagcgtggccgccgaggtggccgccgccgagaaggccgacacctcgaagcccggccacgtcgcggcgccgttccagggcgtggtgtcgatcgtggtcgaggagggccagcaggtcgccgccggcgacaccgttgccacgatcgaggcgatgaagatggaggcctcgatcaccgctccggtcgccggcacggtcgagcggctggccctgtccggcacccaggccgtcgagggcggcgacctggtgctggtgctgtcctga

SEQ ID NO: 73 - protein, 491 aa, Methanothermobacter thermautotrophicus
MFSKILVANRGEIAIRVMRACRELGIKSVAVYSEADKNALFTRYADEAYEIGKPAPSQSYLRIDRILEVAEKAGAEAIHPGYGFLAENPRLGEECEKQGIKLIGPKGSVIEAMGDKITSKKLMKKAGVPVIPGTDQGVSDPDEAARIADSIGYPVIIKASAGGGGIGMRAVYEEDELIRAMESTQSVAASAFGDPTVYIEKYLERPRHIEFQVMADESGNVIHLADRECSIQRRHQKLIEEAPSPIMTPELRERMGSAAVKAAEYIGYENAGTVEFLYSNGDFYFLEMNTRIQVEHPITEVITGVDLVKEQIRVASGEELRFTQKDINIRGHAIECRINAENPLADFAPNPGKITGYRSPGGIGVRVDSGVYMNYEIPPFYDSMISKLIVWGMDRQEAINRMKRALSEYIILGVKTTIPFHKAIMRNEAFRRGELHTHFVDEYRRGIDAEMRKIVKEDQEMVERLQSTFLPSKKVAAISAAIGTYMHSRRG

SEQ ID NO: 74 - DNA, 1476 bp, Methanothermobacter thermautotrophicus
atgttcagtaaaatccttgttgcaaaccgtggtgaaatagcaataagagttatgcgtgcctgcagggaacttggaataaagagcgtggctgtttactctgaagcagacaaaaacgcccttttcacaagatacgccgatgaggcatatgagataggaaaaccagccccatcacagagctacctcaggatcgacaggatactggaggtggccgagaaggcaggcgccgaagccatccacccgggctacggtttcctcgcagagaacccccgcctcggagaggaatgtgaaaaacagggaatcaaactcataggtcccaagggctcagttatagaggccatgggggataaaataacctcaaagaagctcatgaagaaggccggtgtacccgtgatccccggtaccgatcagggcgtcagtgaccctgatgaagccgccaggatagctgattccataggttaccccgtcattataaaggcatctgcaggcgggggcgggatcggtatgcgggctgtctacgaggaggatgaactcataagggccatggagtccacccagtcggtggctgcatcagccttcggggaccccaccgtgtacatcgagaagtaccttgaaaggccacggcacatcgaattccaggtcatggcagatgaatcaggcaacgtgatacaccttgcagacagggagtgctcgatacagaggaggcaccagaaactgatagaggaggcaccgtcccccataatgacaccggaactcagggagaggatgggatccgctgcagttaaggccgctgaatatataggctatgaaaacgcaggtacagttgagttcctttactccaacggggacttctacttccttgagatgaacaccaggatacaggtggaacatcccataacagaggttatcacaggagtcgaccttgtcaaggaacagataagggtcgcctccggagaggaacttcgcttcacccagaaggatataaacatcagggggcatgccatcgagtgccgtataaacgcagagaacccccttgcagatttcgcgccaaaccccggtaagatcacaggttacagatccccagggggtataggtgtgagggttgacagcggcgtttacatgaactatgagataccccccttctatgattccatgatatcaaaactcatagtgtggggtatggaccgccaggaggccataaaccggatgaagagggccctcagtgagtacataatactgggggttaaaaccaccatacccttccacaaggccataatgaggaacgaggcattcaggcgaggcgaactccatacacacttcgttgacgaatacagaaggggtatagacgccgagatgcgaaaaatcgttaaggaggaccaggagatggttgaacgtctccagtcaacatttctcccatcaaagaaggttgccgccatatcagcggcgataggaacctacatgcattcaaggagggggtga

SEQ ID NO: 75 - protein, 568 aa, Methanothermobacter thermautotrophicus
MKGIKVVETAFRDAHQSLLATRLRTRDMTPIAEEMDRVGFFSLEAWGGATFDTCIRYLNEDPWERLRELKEHVKRTPIQMLLRGQNLVGYKHYPDDIVRKFIEKSYENGVDVFRIFDALNDIRNMEYAIKVAREQEAHVQGVICYTISPYHTLESYVDFARELEALECDSVAIKDMAGLISPHDAYELVRALKEETDLMVNLHCHCTSGMTPMSYYAACEAGVDILDTAISPLSWGASQPPTESIVAALRDTPYDTGLDLEILKNIKKYFEEIRKKYSSILDPIAEQIDTDVLIYQIPGGMLSNLVAQLKEQNALDRYEEVLEEMPRVRKDMGYPPLVTPTSQIVGIQAVMNVLSGERYSMVTNEVKDYFRGLYGRPPAPLNEEVARKVIGDEKPIDCRPADILKPQYDECRRKGEEMGIIEKEEDILTLALYPAIAPKFLRGEIEEEPLEPPAEEMAPTGEVPTVFHVEVDGDEFEVKVVPTGYMTIEEAEPEPVDVEGAVKSTMQGMVVKLKVSEGDQVNAGDVVAVVEAMKMENDIQTPHGGVVEKIYTAEGEKVETGDIIMVIK

SEQ ID NO: 76 - DNA, 1707 bp, Methanothermobacter thermautotrophicus
atgaaagggataaaggtcgttgaaacagcattcagggatgcgcaccagtcacttcttgcaacacgcctccgtacccgtgacatgacacccatcgcagaggaaatggaccgggtgggtttcttctcactggaggcatggggcggtgcaaccttcgatacctgcatacgctacctgaatgaggatccatgggagaggctacgggaacttaaggaacacgtgaaaaggacgccgatacagatgctcctcaggggccagaaccttgtggggtacaagcactaccccgatgacatagtgaggaagttcattgagaagtcctatgaaaacggcgttgatgtcttcaggatattcgacgccctcaatgacataaggaacatggagtacgccataaaggtcgccagggaacaggaagcccatgtgcagggagtcatctgctacaccatcagcccttatcacacccttgagagttatgtggactttgcaagggaactggaggcccttgaatgtgactccgttgcaataaaggacatggcaggcctaatatctccacatgatgcctacgaactcgtgagggccctcaaggaagagaccgacctcatggtgaaccttcactgccactgcacaagtggaatgacacccatgagctactatgccgcctgtgaggccggcgttgatatacttgataccgccatatcacccctatcctggggtgcctcccagccacccacagagagcattgtggctgcactccgggacacaccctacgacacgggccttgaccttgagatcctgaagaacatcaagaagtacttcgaggagatccggaagaagtacagcagcatcctcgaccccatagccgagcagatcgacacagacgtcctcatataccagatacccgggggtatgctgtcaaaccttgttgcgcagctcaaggagcagaacgccctggaccgctatgaggaggtcctcgaggagatgccccgggtgaggaaggatatgggttaccctccccttgtaaccccaaccagtcagatagtcggtatacaggccgttatgaacgtcctgagcggtgagaggtacagcatggtcaccaatgaggtgaaggactacttccggggactctacggcagaccccctgccccattaaatgaggaggtcgcaaggaaggtcatcggagatgagaaacccatcgactgcagaccagcggacatcctcaaaccccagtatgatgagtgcaggaggaagggtgaggagatgggcataatagagaaggaggaggacatactgaccctcgccctctaccctgccattgcacctaaattcctgaggggtgaaatcgaggaggagcccctggagcccccggcagaggagatggccccgacaggtgaggtgccaaccgtcttccacgtggaggtcgatggtgacgagttcgaggtcaaggtggtccccacaggctacatgaccatcgaggaagctgaacccgaaccggtggatgttgagggtgcagttaagtccaccatgcagggcatggttgtgaagctcaaggtcagtgagggcgaccaggtgaatgccggggacgttgtcgcggttgttgaagccatgaagatggagaacgatatccagacaccccacggtggtgttgttgagaagatatacaccgctgagggtgaaaaggttgagaccggcgacataatcatggtcataaaataa

SEQ ID NO: 77 - protein, 563 aa, Saccharomyces cerevisiae
MSEITLGKYLFERLKQVNVNTVFGLPGDFNLSLLDKIYEVEGMRWAGNANELNAAYAADGYARIKGMSCIITTFGVGELSALNGIAGSYAEHVGVLHVVGVPSISAQAKQLLLHHTLGNGDFTVFHRMSANISETTAMITDIATAPAEIDRCIRTTYVTQRPVYLGLPANLVDLNVPAKLLQTPIDMSLKPNDAESEKEVIDTILALVKDAKNPVILADACCSRHDVKAETKKLIDLTQFPAFVTPMGKGSIDEQHPRYGGVYVGTLSKPEVKEAVESADLILSVGALLSDFNTGSFSYSYKTKNIVEFHSDHMKIRNATFPGVQMKFVLQKLLTTIADAAKGYKPVAVPARTPANAAVPASTPLKQEWMWNQLGNFLQEGDVVIAETGTSAFGINQTTFPNNTYGISQVLWGSIGFTTGATLGAAFAAEEIDPKKRVILFIGDGSLQLTVQEISTMIRWGLKPYLFVLNNDGYTIEKLIHGPKAQYNEIQGWDHLSLLPTFGAKDYETHRVATTGEWDKLTQDKSFNDNSKIRMIEIMLPVFDAPQNLVEQAKLTAATNAKQ

SEQ ID NO: 78 - DNA, 3023 bp, Saccharomyces cerevisiae
tatttgtatcgaggtgtctagtcttctattacactaatgcagtttcagggttttggaaaccacactgtttaaacagtgttccttaatcaaggatacctctttttttttccttggttccactaattcatcggttttttttttggaagacatcttttccaacgaaaagaatatacatatcgtttaagagaaattctccaaatttgtaaagaagcggacccagacttaagcctaaccaggccaattcaacagactgtcggcaacttcttgtctggtctttccatggtaagtgacagtgcagtaataatatgaaccaatttatttttcgttacataaaaatgcttataaaactttaactaataattagagattaaatcgcttattgcttagcgttggtagcagcagtcaacttagcttgttcaaccaagttttgtggagcatcgaagactggcaacatgatttcaatcattctgatcttagagttgtcgttgaaagacttgtcttgggtcaacttgtcccattcaccggtggtagcgactctgtgggtttcatagtccttagcaccgaaagttggcaacaaggataggtggtcccaaccttgaatttcgttgtattgagcctttggaccgtgaatcaacttttcaatggtgtaaccatcgttgttcaagacgaacaagtatggcttcaagccccatctgatcatggtggagatttcttgaacagtcaattgcaaagaaccgtcaccaatgaataagataactctcttctttggatcaatttcttcagcagcgaaagcagcacccaaggtagcaccagtggtgaaaccaatggaaccccataagacttgagagataccgtaggtgttgtttgggaaagtggtttggttgataccgaaagcggaggtaccggtttcagcaatgacaacatcaccttcttgcaagaagttacccaattggttccacatccattcttgcttcaatggggtagaagctgggacagcagcgttagctggagttctagctgggacagcaactggcttgtaacccttagcggcgtcagcaatagtggtcaacaacttttgcaaaacgaatttcatttggacacctgggaaagtggcgtttctgatcttcatgtggtcggagtggaattcgacaatgttcttggtcttgtaagagtaagagaaagaaccggtgttgaaatcagacaacaaagcaccgacagacaaaatcaagtcagcagattcaacggcttccttaacttctggcttggacaaggtaccgacgtaaacaccaccgtatcttgggtgttgttcgtcaatggaacccttacccattggggtgacgaaagctgggaattgagtcaagtcaatcaacttcttagtttcagccttgacgtcgtgtctggaacaacaagcatcagccaagataactgggttcttagcatccttgaccaaagccaagatggtgtcaatgacttccttttcggattcagcatcgtttggcttcaaagacatgtcaattggagtttgcaacaacttagctgggacgttcaagtcgaccaagttagctggcaaacctaagtagactggtctttgggtgacgtaagtggttctgatacatctgtcaatttcagctggggcggtagcaatgtcagtgatcatagcagtggtttcagaaatgttggcagacattctgtggaaaacagtgaagtcaccgttacccaaggtgtggtgcaacaacaattgcttagcttgagcagagatggatgggacaccaacaacgtgcaaaacaccgacgtgttcagcgtaagaaccggcaataccgttcaaagcagacaattcaccgacaccgaaggtggtgatgatacaagacatacccttgatacgagcgtaaccatcagcggcgtaagcagcgttcaattcgttggcgttaccagcccatctcataccttcaacttcgtagatcttgtccaacaaggacaagttgaagtcacctggcaaaccgaaaacggtgttaacgttgacttgctttaatctttcgaacaaatatttacccaaagtaatttcagacattttgattgatttgactgtgttattttgcgtgaggttatgagtagaaaataataattgagaaaggaatatgacaagaaatatgaaaataaagggaacaaacccaaatctgattgcaaggagagtgaaagagccttgtttatatatttttttttcctatgttcaacgaggacagctaggtttatgcaaaaatgtgccatcaccataagctgattcaaatgagctaaaaaaaaaatagttagaaaataaggtggtgttgaacgatagcaagtagatcaagacaccgtctaacagaaaaaggggcagcggacaatattatgcaattatgaagaaaagtactcaaagggtcggaaaaatattcaaacgatatttgcataaaatcctcaattgattgattattccatagtaaaataccgtaacaacacaaaattgttctcaaattcataaattattcattttttccacgagcctcatcacacgaaaagtcagaagagcatacataatcttttaaatgcataggttatgcattttgcaaatgccaccaggcaacaaaaatatgcgtttagcgggcggaatcgggaaggaagccggaaccaccaaaaactggaagctacgtttttaaggaaggtatgggtgcagtgtgcttatctcaagaaatattagttatgatataaggtgttgaagtttagagataggtaaataaacgcggggtgtgtttattacatgaagaagaagttagtttctgccttgcttgtttatcttgcacatcacatcagcggaacatatgctcacccagtcgcatgttgttaccctcatgaaacatgtatgagatattactttgaataggttacttgcatgcatttcggcgtgcgggtaccacctctttgcatgagcttgttcctttttcaagttgaagactatatattttattgagtttatgttatggggaggctaccct

SEQ ID NO: 79 - protein, 563 aa, Saccharomyces cerevisiae
MSEITLGKYLFERLSQVNCNTVFGLPGDFNLSLLDKLYEVKGMRWAGNANELNAAYAADGYARIKGMSCIITTFGVGELSALNGIAGSYAEHVGVLHVVGVPSISSQAKQLLLHHTLGNGDFTVFHRMSANISETTAMITDIANAPAEIDRCIRTTYTTQRPVYLGLPANLVDLNVPAKLLETPIDLSLKPNDAEAEAEVVRTVVELIKDAKNPVILADACASRHDVKAETKKLMDLTQFPVYVTPMGKGAIDEQHPRYGGVYVGTLSRPEVKKAVESADLILSIGALLSDFNTGSFSYSYKTKNIVEFHSDHIKIRNATFPGVQMKFALQKLLDAIPEVVKDYKPVAVPARVPITKSTPANTPMKQEWMWNHLGNFLREGDIVIAETGTSAFGINQTTFPTDVYAIVQVLWGSIGFTVGALLGATMAAEELDPKKRVILFIGDGSLQLTVQEISTMIRWGLKPYIFVLNNNGYTIEKLIHGPHAEYNEIQGWDHLALLPTFGARNYETHRVATTGEWEKLTQDKDFQDNSKIRMIEVMLPVFDAPQNLVKQAQLTAATNAKQ

SEQ ID NO: 80 - DNA, 3087 bp, Saccharomyces cerevisiae
tacgtatacgaattccttcaacaaaggccaaggaaataaagcaaataacaataacaccattattttaattttttttctattactgtcgctaacacctgtatggttgcaaccaggtgagaatccttctgatgcatactttatgcgtttatgcgttttgcgccccttggaaaaaaattgattctcatcgtaaatgcatactacatgcgtttatgggaaaagcctccatatccaaaggtcgcgtttcttttagaaaaactaatacgtaaacctgcattaaggtaagattatatcagaaaatgtgttgcaagaaatgcattatgcaattttttgattatgacaatctctcgaaagaaatttcatatgatgagacttgaataatgcagcggcgcttgctaaaagaacttgtatataagagctgccattctcgatcaatatactgtagtaagtcctttcctctctttcttattacacttatttcacataatcaatctcaaagagaacaacacaatacaataacaagaagaacaaaatgtctgaaataaccttaggtaaatatttatttgaaagattgagccaagtcaactgtaacaccgtcttcggtttgccaggtgactttaacttgtctcttttggataagctttatgaagtcaaaggtatgagatgggctggtaacgctaacgaattgaacgctgcctatgctgctgatggttacgctcgtatcaagggtatgtcctgtattattaccaccttcggtgttggtgaattgtctgctttgaatggtattgccggttcttacgctgaacatgtcggtgttttgcacgttgttggtgttccatccatctcttctcaagctaagcaattgttgttgcatcataccttgggtaacggtgacttcactgttttccacagaatgtctgccaacatttctgaaaccactgccatgatcactgatattgctaacgctccagctgaaattgacagatgtatcagaaccacctacactacccaaagaccagtctacttgggtttgccagctaacttggttgacttgaacgtcccagccaagttattggaaactccaattgacttgtctttgaagccaaacgacgctgaagctgaagctgaagttgttagaactgttgttgaattgatcaaggatgctaagaacccagttatcttggctgatgcttgtgcttctagacatgatgtcaaggctgaaactaagaagttgatggacttgactcaattcccagtttacgtcaccccaatgggtaagggtgctattgacgaacaacacccaagatacggtggtgtttacgttggtaccttgtctagaccagaagttaagaaggctgtagaatctgctgatttgatattgtctatcggtgctttgttgtctgatttcaataccggttctttctcttactcctacaagaccaaaaatatcgttgaattccactctgaccacatcaagatcagaaacgccaccttcccaggtgttcaaatgaaatttgccttgcaaaaattgttggatgctattccagaagtcgtcaaggactacaaacctgttgctgtcccagctagagttccaattaccaagtctactccagctaacactccaatgaagcaagaatggatgtggaaccatttgggtaacttcttgagagaaggtgatattgttattgctgaaaccggtacttccgccttcggtattaaccaaactactttcccaacagatgtatacgctatcgtccaagtcttgtggggttccattggtttcacagtcggcgctctattgggtgctactatggccgctgaagaacttgatccaaagaagagagttattttattcattggtgacggttctctacaattgactgttcaagaaatctctaccatgattagatggggtttgaagccatacatttttgtcttgaataacaacggttacaccattgaaaaattgattcacggtcctcatgccgaatataatgaaattcaaggttgggaccacttggccttattgccaacttttggtgctagaaactacgaaacccacagagttgctaccactggtgaatgggaaaagttgactcaagacaaggacttccaagacaactctaagattagaatgattgaagttatgttgccagtctttgatgctccacaaaacttggttaaacaagctcaattgactgccgctactaacgctaaacaataagctaattaacataaaactcatgattcaacgtttgtgtatttttttacttttgaaggttatagatgtttaggtaaataattggcatagatatagttttagtataataaatttctgatttggtttaaaatatcaactattttttttcacatatgttcttgtaattacttttctgtcctgtcttccaggttaaagattagcttctaatattttaggtggtttattatttaattttatgctgattaatttatttactttcgtattcggttttgtacctttagctatgatcttagctaattgaagagggtggtgtgatctttaaccataccttattatctttcagctgcttaccattttcttatattgatttttagcgaaagatttttattcacaagctttttttatccttaatgctcgaatactacaacaaaacaaaaaacattaaacagtttttaattttgtgaacaaactgaattacaaggccttacatcttatttagaatatattaagaaacagaggccaacatgccttcttaattatattgatatggacctctgtccttcctaaaaacgggtttttgttcgatgaaaaatcaccagtagagcaccatatatgaatttacaatcattgtagggaaaagaaaacttgttctgcttcgccaattgatttcatttctttttttcctttgtttttgttgtatactattaatatgcgtagttctttgtcacttagtggttttttgtttaatttataacgcgaaagctgcatactaaaaatatagagatgaatggaactccgaacaagcaagagagatattatctatctctgttccataataataaccagtagttcagttggggaacttaata

SEQ ID NO: 81 - protein, 533 aa, Saccharomyces cerevisiae
MSEITLGKYLFERLKQVNVNTIFGLPGDFNLSLLDKIYEVDGLRWAGNANELNAAYAADGYARIKGLSVLVTTFGVGELSALNGIAGSYAEHVGVLHVVGVPSISAQAKQLLLHHTLGNGDFTVFHRMSANISETTSMITDIATAPSEIDRLIRTTFITQRPSYLGLPANLVDLKVPGSLLEKPIDLSLKPNDPEAEKEVIDTVLELIQNSKNPVILSDACASRHNVKKETQKLIDLTQFPAFVTPLGKGSIDEQHPRYGGVYVGTLSKQDVKQAVESADLILSVGALLSDFNTGSFSYSYKTKNVVEFHSDYVKVKNATFLGVQMKFALQNLLKVIPDVVKGYKSVPVPTKTPANKGVPASTPLKQEWLWNELSKFLQEGDVIISETGTSAFGINQTIFPKDAYGISQVLWGSIGFTTGATLGAAFAAEEIDPNKRVILFIGDGSLQLTVQEISTMIRWGLKPYLFVLNNDGYTIEKLIHGPHAEYNEIQTWDHLALLPAFGAKKYENHKIATTGEWDALTTDSEFQKNSVI

SEQ ID NO: 82 - DNA, 5577 bp, Saccharomyces cerevisiae
gatcaccgagtttttctggaactctgaatcagtggttaaggcatcccactcacccgtagtggcgatcttgtgattttcgtactttttcgcaccaaatgcgggcaacagggcgaggtgatcccaggtctggatttcgttgtactctgcgtgaggcccatgaatcagcttttcgatagtgtagccgtcgttgttaaggacaaaaagatacggctttaacccccatctgatcatggtggagatttcttggacggttaactgcaaagacccgtcacctatgaataagatgactctcttgttggggtcaatctcctcagcggcaaaggcagcacctaaagttgctcctgttgtaaaaccgatggacccccacaacacctgcgagataccgtaggcgtccttaggaaagatagtttgattgataccgaaggcagacgtgccggtctcggaaatgataacatcaccttcttgcaagaatttggacaattcgttccacaaccactcttgtttcaagggcgtgctagcaggtacacctttgtttgcgggagttttggttggtacgggaacgctcttgtagcccttaacaacatcgggaataaccttcagtaagttttgtagtgcaaatttcatttgtacaccgaggaacgtagcgttcttcacctttacgtaatcggaatgaaactccactacatttttagtcttgtaggagtaggaaaacgaacctgtgttaaaatcagagagcaaagcaccgaccgaaaggatcaaatcagccgactcaacggcctgtttcacgtcttgtttggacagcgttcccacataaacaccgccatatctgggatgctgttcatctattgaccctttacctagaggtgtcacaaaagctgggaattgcgtcaaatcaattaacttctgggtttcttttttaacgttgtgcctagaagcacaggcatccgatagtataacagggtttttcgaattctggatcaattctagtacggtatcaataacttccttttcagcttcgggatcgttaggttttaatgatagatcaatcggtttttccaaaagagaaccaggaacctttagatctaccaaattcgctggcaaccccaagtagctaggcctttgtgttataaatgttgtcctgatcaacctatcgatttctgaaggggctgtagcaatgtctgtaatcattgatgtagtttctgagatattggcggacattctgtgaaaaacggtaaaatcaccgttacccaaggtatgatgcaacaacaattgcttagcctgagcggagatagaggggacaccaacaacatgcagtacaccgacgtgttctgcatacgatcctgcaataccattcaaggcggataattcacctacgccaaaagtagttaccagcacagataaacccttgatgcgtgcgtaaccatcggcggcataggcggcgttcagctcatttgcattaccagcccatctcaatccatctacctcgtaaatcttgtccaatagggacaagttgaagtcgcctggtagcccaaaaatggtgttaacattaacttgcttcaatctttcaaataagtattttccaagagtaatttcagacattttgttggcaatatgtttttgctatattacgtgggttttttatttatactgtatataaaagaggactgcaatagcacaagattaagatagaatggcttcaaacagccgccttttatacatattggtaaaagctcgcgaatcgcaccatatcccttatcctgtaatcaaatcgatctaggtgcagatacagatcaattcataaaaagaaattgaagcaccagtttatcactactacactatctttttcttttttttttttttttgcgaagtttcgccctttgttcaatatcacttgataagttgtgggctttttctgtcactcattcggcttaaaaagtattcgttcttttgtgttttatgaaaagggaacgtgatataaaaaaacatcctttggtgtgggacatgggcttttgtttagagaatggttatcactaccgcccccacccttgaaagccacagaaaatgaaaaagtatgtgaataaggtgtgaactctataacattttggccaaatgccacagccgatctgcatattccaatggacataatgcaacaacaattgatgtcacattctcttacacacttcgattggtccgtacgtagtactttttacataactgactcaggcgtttccttcattgaaatgctcatctattgccaagtacatagaatccacagtgcataggtttatgagatgcttggaagatgtacgatcgcctgcactatattagtatattttttcaggctttacaaaaccagaaagaaattaccgactgtaatacttaatttccatgattttaatcgtatggtccgtgaggaaagaggaattttaggtaaaaaaaaacctttgtctatcaaaacataaaagaaaagaaaaaaattaaattgaataagtcagctttttagcatgaccacagtaataatagtaatacgatatcagcatgagctgctaaacattaagaatttttgaattgtgttcgctggtaagagaaaatagggtagcattagttgcgagatggaaaattaaaatatgcgtcataaggtattttcgacgttgaagattaggggttgcaagtccgagaactaaactgccttcacgacgtcaaacttattgtatggtgacaataaaacgaattcaagaagccagagatgatgaggaaccgatgacgaggcacatggggatagaacctccgttatctccattccgcgttgagcagctctcctgcgtgctttcacagagaccctaagccaagaccgcggacggccctctttttcaaggggatcaccggtaaggggccaagcggtgaaattgcgtattgtttcctcctatcaatgatgagtacgtcgccgatccagaagggttattattgtcattgccagtactattcgtatgctgaaaaagtatagttcacttcaccctctggctgcaggctagcctagccgataatgcccccgactccctcaacaggtagaatttgtaaggattcgacgtagcctggacacattgtgcatttatcgtatcccctactgctacacgtataagaagtcgttgctttacctctattccagaactcaatcttgtcgttacttgcccttattaaaaaaatccttctcttgtctcatgccaataagatcaatcagctcagcttcacaaatgaacgtgttcggtaaaaaagaagaaaagcaagaaaaagtttactctctacaaaacggttttccgtactctcatcacccatacgcttctcaatactcaagaccagacggccctatcttactgcaagacttccatctgctggaaaatattgcaagtttcgatagagaaagagttccggagcgtgtagtccatgccaaaggtggtggttgtagactggagttcgaactaacagattctttgagtgatattacatacgccgctccataccagaatgtgggttacaaatgtcctggtcttgttcgtttttccaccgttggtggtgaaagtggtacaccagacactgcaagagacccaagaggtgtttcttttaaattctataccgagtgggggaaccatgactgggtcttcaacaatactcccgtcttcttcctcagagacgctattaagtttcccgtatttattcattcgcaaaagagagaccctcagtctcatctgaatcagtttcaggacactaccatatactgggattatctaacattgaatccggaatcaatccatcaaataacttacatgtttggtgatagaggtactcctgcttcgtgggctagtatgaacgcgtactctggtcattccttcatcatggtcaacaaagaaggtaaggacacatatgtgcaattccacgtcttgtcggatactggttttgaaaccttgactggagataaggctgctgaactgtcaggctcccaccctgattataatcaggcaaagctgttcactcaattgcaaaatggcgaaaagccaaaatttaactgttatgtgcaaacaatgacacccgaacaagcaactaagttcaggtattcggtaaatgacctaacgaaaatatggccacacaaggaattccctttgagaaaatttggtaccatcaccctaacggagaatgttgacaattatttccaagaaattgaacaagttgcattcagtccaacgaacacttgtatcccaggtattaagccttctaatgattccgttctacaagccagacttttctcctatccagacactcaacgtcatagattgggagccaactatcagcaattgcccgtcaacagaccaagaaacttgggatgtccatactccaaaggtgattcccaatacactgccgaacagtgtccatttaaagcagtgaacttccaaagggacggcccaatgagttactacaatttcggtcctgagccaaattatatttccagtttaccaaatcaaactctgaaattcaaaaatgaagacaacgacgaagtatctgataagttcaaagggatagttcttgacgaagtaacagaagtttctgtgagaaaacaggaacaagaccaaatcagaaacgagcatattgttgatgccaaaattaatcaatattactacgtttatggtattagtccactagacttcgaacagccaagagctctatatgaaaaggtatacaacgatgaacagaagaaattattcgttcataacgttgtttgccacgcttgtaagatcaaagatcctaaagtcaaaaagagagttacgcaatactttggtttgctaaacgaagatttgggtaaagtcattgcagaatgcttgggagttccttgggaacctgttgaccttgaaggttatgccaagacttggtccattgcaagtgccaattaaggcagcactatttattcataattattcgtaattatatctccataattatttattcataagttttctttaagtttattctctacatcactagttattacaaattggtcgtatgtacaagcactaatatttcatacttatcgtacttcatacatagcaaatcctgttaggaaaaatatggcagcaaaacagattggctgcctacttttgacacatttttttctaattcggtacttagatcggcatgaactcaacgattatcgcattatacggacaatctgaaaaaaaaaagtagcctaacttatgcagttgtgtgtttataacgttgaattcctaaacctcttgaaggtgtaatataacaagtaacataactaggttttcacaactcgttagtttctattaaaagaggaataaacaaattttattaggactaagaggattatacagagtaccagcagagaaaactttaaattctttctgttataataatatcttaccaaagttttttgttttctatctccacatttttcgtaccatctctttaggtaatcactctgaataacttttattcatatacaccccaatattttttaagattccacctatctccgttacataaaaggatccatgcacaattttc

SEQ ID NO: 83 - protein, 925 aa, Saccharomyces cerevisiae
MLSIQQRYNICLMAERHPKWTQLELAKWAYETFQLPKIPSQGTISRLLARKSTYMNCKEHEKDANRLRKPNNLLVRKILQEWISQSLWNGIPITSPIIQDTAQAVWHRIPAETREGNGSFSYKWISNFLSKMDVNISVLDEELPKTPKVWTFEERDVLKAYFSKIPPKDLFTLIEAFLSYNLPLDYAQYEASSIQRRIEVATVMLCSNLDGSEKLKPVVVGKYDSYKSFRNYFPNEPNDPVSQSMLGTKMAKKFDISYHSNRKAWLTSNLFHNWLVRWDKRLVAVNRKIWIVLDDSCCHRIINLRLQNIKLVYTSSNSKFLPFNWGVWDEFKTRYRIQQYQALIDLQNRISKNIQNKNKSERNECIPNGKKCLISFEQSQLTMSNAFKFIKKAWDDIPVDAIKANWKSSGLLPPEMIHLNENVSMAFKKNEVLESVLNRLCDEYYCVKKWEYEMLLDLNIENKNTNFLSTEELVESAIVEPCEPDFDTAPKGNEVHDDNFDVSVFANEDDNNQNHLSMSQASHNPDYNSNHSNNAIENTNNRGSNNNNNNNGSSNNINDNDSSVKYLQQNTVDNSTKTGNPGQPNISSMESQRNSSTTDLVVDGNYDVNFNGLLNDPYNTMKQPGPLDYNVSTLIDKPNLFLSPDLDLSTVGVDMQLPSSEYFSEVFSSAIRNNEKAASDQNKSTDELPSSTAMANSNSITTALLESRNQAQPFDVPHMNGLLSDTSKSGHSVNSSNAISQNSLNNFQHNSASVAEASSPSITPSPVAINSTGAPARSIISAPIDSNSSASSPSALEHLEGAVSGMSPSSTTILSNLQTNINIAKSLSTIMKHAESNEISLTKETINELNFNYLTLLKRIKKTRKQLNSESIKINSKNAQDHLETLLSGAAAAAATSANNLDLPTGGSNLPDSNNLHLPGNTGFF

SEQ ID NO: 84 - DNA, 4333 bp, Saccharomyces cerevisiae
gcacaaggcctgcacactattcgaagtatctgtgctattgtatggactaataatttctaattcatccttcaagcgttcttcttgcagttgctcgatgaaagtagtttcatttcttttactttctggggttttgtaccctatacctacaaaatccgggtttactacctcaatctgtgatgtctcaggtgtccactcttgctcttgcgtgaacaattctccaattacaaaatcgcttaaggaccaaggcgtgtcaagttgctcacgcatgttcattgtgattttccaatgatctatttcttccgttaaactgtagcataacttaaatattcaacttgaagctcttgatagttcaaacttgcttgcccgtagacatgaagagttaagcctatcaaatcggttatgttcaaccccatgataggatgctatcttcttaactttacatgttaagaatctcatgtcactagtataaccaccaatgaagagtctgaagtacaatcgtccaactgaaaaaaatgtattcttgtttcccaatccatttgaactggagtccaatgatgcagccaataaggtgtatttgctgtaaaggatgatttttccagaacaacatcgacaaccgcctatcataatacttttcgcaaatttgcaaagaaactctcatccggtactttaaatctccaacaaatattcgaacgtcctctgtcccactataataactgttgtatttgaacagccttggaatataataacaaacatcgccttcttgatgagctatatgtccgtacttatccatggctccaacccattattaaaagccagcttattgctcttttttcgcacagaaatggaatatcaacaagcaggatttcatatattccaatgcttacttctttttccatgcctttacatacttctttttggtgtgattcgtggttttgttgttagaatagctgctgcatatttccgttctgagtgactttgcccatcgaagtcaattacttgaaagtaagaaattatcaaaaccaatagctgcttaaaaatcagttgcaagatttgaatgaaatcagcaaagtttgatcaatcgtgactagttcgcgttttgaattttgtggtaacaccaagcagtaaagagacagctttattataaccagcatgctttccattcagcaaagatataatatttgtctaatggcggagaggcacccaaagtggacgcaacttgaattggcaaaatgggcttatgagacgttccagctgccaaaaattccatcccaaggcacaatatcgcgtttgttggcaaggaaatcaacttatatgaattgtaaagagcatgaaaaagatgcgaatagattaaggaagccaaataatcttttggttcggaaaattttacaagaatggatttctcaaagtttgtggaatggaatccctataacgtcacctattattcaagacactgcacaagctgtttggcacagaattcctgcggagactcgcgagggaaatggttcttttagttataaatggatttcgaattttttatcaaaaatggatgtcaatatttctgttttagacgaagagttacccaaaaccccaaaagtctggacatttgaagagagggatgtattgaaggcttatttctccaaaattcctccaaaggatttattcactttgatagaagcgtttctctcctacaacctaccgttggattatgctcaatatgaagcaagtagcattcaaaggcgtatagaggtggcaactgtcatgctgtgctccaatttagatggctctgaaaagttaaaacctgttgtcgtgggcaaatatgatagttacaaatcattcaggaattatttccccaatgaaccgaatgatcctgtgtcacaatcaatgttgggtactaagatggctaagaaatttgatatctcataccatagtaacaggaaagcatggctaacgagcaatcttttccacaactggttagtcaggtgggataagaggttggttgctgtgaataggaagatttggattgttttggatgattcttgctgtcatcgaataattaatttgcgccttcaaaatataaaacttgtatacacttcctcaaattcaaagtttttgccatttaactggggtgtctgggatgaattcaaaacacgatacagaatacaacagtatcaggcgctcattgacttgcaaaatagaatttcgaagaatatccaaaataaaaataaatcagaacggaacgaatgcatacccaatggtaaaaaatgtttgattagctttgagcagagtcaactcacaatgtcaaatgcattcaaatttattaaaaaagcttgggatgatatacccgttgatgctatcaaagcaaattggaaaagttccggtctgcttcctcctgaaatgatacatttgaatgagaatgttagtatggcatttaagaaaaacgaagtcttagagagcgttttgaatagattatgtgatgaatactactgtgttaaaaaatgggaatatgaaatgttgttagatttaaacattgaaaacaaaaacacaaacttcttgagtacagaagaattagtggaaagtgctattgtggagccttgtgaacctgattttgatactgcgccaaaaggtaatgaggtccatgatgataattttgatgtatcagtttttgccaatgaagatgataataatcaaaatcatttaagcatgtcacaagctagccacaaccccgattacaacagtaatcacagcaacaatgctattgaaaatactaataatagaggcagtaataataataacaataataatggtagtagtaataatattaatgataatgatagtagcgtaaagtatttgcaacagaatactgttgataatagtaccaaaacaggtaaccctggacaaccaaatatttctagtatggaatcgcaaaggaactcttcgactacagatttagttgttgacggtaattatgacgtcaattttaacggccttttgaatgatccatataatacaatgaaacagccgggcccattagattataatgtcagtacattaatcgataaacctaatttattcttaagtcctgatttggatttatctactgttggcgttgatatgcaactaccatcatcagaatattttagcgaagtattttcttcagctatcagaaacaacgaaaaagctgcctcagatcagaacaaatcaactgatgaacttccttcaagcacggccatggcaaattcaaactcgataacgactgcccttctagagtcaagaaatcaagcacagccgtttgatgtcccacatatgaatgggttgctgagcgacacatcaaaaagcggacattctgttaattcctcaaatgctatatctcaaaattctctgaataactttcaacataattcggcgtccgtcgcggaagcttcgtctccttcaattacaccatctcctgtggcaataaactcaacaggcgctccagcgagatctattatatctgcacccatagactcaaattcctctgcgtcatcgccatcagctttagaacatcttgaaggtgctgtttccggtatgtcaccctcttccaccacaatattaagtaacttacaaacaaatataaatatcgccaaatcattgagtaccattatgaaacatgcagaatcaaacgaaatatcactgacgaaagaaacaataaatgaacttaatttcaattatttgacacttttaaaaaggattaaaaagactagaaaacaattaaatagcgaaagcattaaaataaacagtaagaatgcacaagaccatttagaaacccttctatctggggctgcagctgcagctgcaacttccgccaataacttggaccttccgactggtggttcaaacctcccagactctaataacttacacttacctggtaacacaggctttttttagatataaacttaataagatctcgatattcattgctcttttttgtagttttgcctttaactctcggttttttgaatttatcattttcctgatgacctttgactgctctttgatctatcctgaacacaagaaaacgaaaagaataaataaaagtagagatatttattatttagcctgtaccgatcactggaaactggattctattaattttacttattcaaaccaagatatctttttcttttttttctttttttttttttttttcagcagtacattcctgaagtgtacacttgccttgtgtattaaatgatgattcgatattataaaacaccatttaagtcgtcattaatttcaatatcgctttcgtctactgaaacaatttaccttgacttcttattttcaggaattc

SEQ ID NO: 85 - protein, 650 aa, Yarrowia lipolytica
MSANENISRFDAPVGKEHPAYELFHNHTRSFVYGLQPRACQGMLDFDFICKRENPSVAGVIYPFGGQFVTKMYWGTKETLLPVYQQVEKAAAKHPEVDVVVNFASSRSVYSSTMELLEYPQFRTIAIIAEGVPERRAREILHKAQKKGVTIIGPATVGGIKPGCFKVGNTGGMMDNIVASKLYRPGSVAYVSKSGGMSNELNNIISHTTDGVYEGIAIGGDRYPGTTFIDHILRYEADPKCKIIVLLGEVGGVEEYRVIEAVKNGQIKKPIVAWAIGTCASMFKTEVQFGHAGSMANSDLETAKAKNAAMKSAGFYVPDTFEDMPEVLAELYEKMVAKGELSRISEPEVPKIPIDYSWAQELGLIRKPAAFISTISDDRGQELLYAGMPISEVFKEDIGIGGVMSLLWFRRRLPDYASKFLEMVLMLTADHGPAVSGAMNTIITTRAGKDLISSLVAGLLTIGTRFGGALDGAATEFTTAYDKGLSPRQFVDTMRKQNKLIPGIGHRVKSRNNPDFRVELVKDFVKKNFPSTQLLDYALAVEEVTTSKKDNLILNVDGAIAVSFVDLMRSCGAFTVEETEDYLKNGVLNGLFVLGRSIGLIAHHLDQKRLKTGLYRHPWDDITYLVGQEAIQKKRVEISAGDVSKAKTRS

SEQ ID NO: 86 - DNA, 1953 bp, Yarrowia lipolytica
atgtctgccaacgagaacatctcccgattcgacgcccctgtgggcaaggagcaccccgcctacgagctcttccataaccacacacgatctttcgtctatggtctccagcctcgagcctgccagggtatgctggacttcgacttcatctgtaagcgagagaacccctccgtggccggtgtcatctatcccttcggcggccagttcgtcaccaagatgtactggggcaccaaggagactcttctccctgtctaccagcaggtcgagaaggccgctgccaagcaccccgaggtcgatgtcgtggtcaactttgcctcctctcgatccgtctactcctctaccatggagctgctcgagtacccccagttccgaaccatcgccattattgccgagggtgtccccgagcgacgagcccgagagatcctccacaaggcccagaagaagggtgtgaccatcattggtcccgctaccgtcggaggtatcaagcccggttgcttcaaggttggaaacaccggaggtatgatggacaacattgtcgcctccaagctctaccgacccggctccgttgcctacgtctccaagtccggaggaatgtccaacgagctgaacaacattatctctcacaccaccgacggtgtctacgagggtattgctattggtggtgaccgataccctggtactaccttcattgaccatatcctgcgatacgaggccgaccccaagtgtaagatcatcgtcctccttggtgaggttggtggtgttgaggagtaccgagtcatcgaggctgttaagaacggccagatcaagaagcccatcgtcgcttgggccattggtacttgtgcctccatgttcaagactgaggttcagttcggccacgccggctccatggccaactccgacctggagactgccaaggctaagaacgccgccatgaagtctgctggcttctacgtccccgataccttcgaggacatgcccgaggtccttgccgagctctacgagaagatggtcgccaagggcgagctgtctcgaatctctgagcctgaggtccccaagatccccattgactactcttgggcccaggagcttggtcttatccgaaagcccgctgctttcatctccactatttccgatgaccgaggccaggagcttctgtacgctggcatgcccatttccgaggttttcaaggaggacattggtatcggcggtgtcatgtctctgctgtggttccgacgacgactccccgactacgcctccaagtttcttgagatggttctcatgcttactgctgaccacggtcccgccgtatccggtgccatgaacaccattatcaccacccgagctggtaaggatctcatttcttccctggttgctggtctcctgaccattggtacccgattcggaggtgctcttgacggtgctgccaccgagttcaccactgcctacgacaagggtctgtccccccgacagttcgttgataccatgcgaaagcagaacaagctgattcctggtattggccatcgagtcaagtctcgaaacaaccccgatttccgagtcgagcttgtcaaggactttgttaagaagaacttcccctccacccagctgctcgactacgcccttgctgtcgaggaggtcaccacctccaagaaggacaacctgattctgaacgttgacggtgctattgctgtttcttttgtcgatctcatgcgatcttgcggtgcctttactgtggaggagactgaggactacctcaagaacggtgttctcaacggtctgttcgttctcggtcgatccattggtctcattgcccaccatctcgatcagaagcgactcaagaccggtctgtaccgacatccttgggacgatatcacctacctggttggccaggaggctatccagaagaagcgagtcgagatcagcgccggcgacgtttccaaggccaagactcgatcatag

SEQ ID NO: 87 - protein, 497 aa, Yarrowia lipolytica
MSAKSIHEADGKALLAHFLSKAPVWAEQQPINTFEMGTPKLASLTFEDGVAPEQIFAAAEKTYPWLLESGAKFVAKPDQLIKRRGKAGLLVLNKSWEECKPWIAERAAKPINVEGIDGVLRTFLVEPFVPHDQKHEYYINIHSVREGDWILFYHEGGVDVGDVDAKAAKILIPVDIENEYPSNATLTKELLAHVPEDQHQTLLDFINRLYAVYVDLQFTYLEINPLVVIPTAQGVEVHYLDLAGKLDQTAEFECGPKWAAARSPAALGQVVTIDAGSTKVSIDAGPAMVFPAPFGRELSKEEAYIAELDSKTGASLKLTVLNAKGRIWTLVAGGGASVVYADAIASAGFADELANYGEYSGAPNETQTYEYAKTVLDLMTRGDAHPEGKVLFIGGGIANFTQVGSTFKGIIRAFRDYQSSLHNHKVKIYVRRGGPNWQEGLRLIKSAGDELNLPMEIYGPDMHVSGIVPLALLGKRPKNVKPFGTGPSTEASTPLGV

SEQ ID NO: 88 - DNA, 1494 bp, Saccharomyces cerevisiae
atgtcagcgaaatccattcacgaggccgacggcaaggccctgctcgcacactttctgtccaaggcgcccgtgtgggccgagcagcagcccatcaacacgtttgaaatgggcacacccaagctggcgtctctgacgttcgaggacggcgtggcccccgagcagatcttcgccgccgctgaaaagacctacccctggctgctggagtccggcgccaagtttgtggccaagcccgaccagctcatcaagcgacgaggcaaggccggcctgctggtactcaacaagtcgtgggaggagtgcaagccctggatcgccgagcgggccgccaagcccatcaacgtggagggcattgacggagtgctgcgaacgttcctggtcgagccctttgtgccccacgaccagaagcacgagtactacatcaacatccactccgtgcgagagggcgactggatcctcttctaccacgagggaggagtcgacgtcggcgacgtggacgccaaggccgccaagatcctcatccccgttgacattgagaacgagtacccctccaacgccacgctcaccaaggagctgctggcacacgtgcccgaggaccagcaccagaccctgctcgacttcatcaaccggctctacgccgtctacgtcgatctgcagtttacgtatctggagatcaaccccctggtcgtgatccccaccgcccagggcgtcgaggtccactacctggatcttgccggcaagctcgaccagaccgcagagtttgagtgcggccccaagtgggctgctgcgcggtcccccgccgctctgggccaggtcgtcaccattgacgccggctccaccaaggtgtccatcgacgccggccccgccatggtcttccccgctcctttcggtcgagagctgtccaaggaggaggcgtacattgcggagctcgattccaagaccggagcttctctgaagctgactgttctcaatgccaagggccgaatctggacccttgtggctggtggaggagcctccgtcgtctacgccgacgccattgcgtctgccggctttgctgacgagctcgccaactacggcgagtactctggcgctcccaacgagacccagacctacgagtacgccaaaaccgtactggatctcatgacccggggcgacgctcaccccgagggcaaggtactgttcattggcggaggaatcgccaacttcacccaggttggatccaccttcaagggcatcatccgggccttccgggactaccagtcttctctgcacaaccacaaggtgaagatttacgtgcgacgaggcggtcccaactggcaggagggtctgcggttgatcaagtcggctggcgacgagctgaatctgcccatggagatttacggccccgacatgcacgtgtcgggtattgttcctttggctctgcttggaaagcggcccaagaatgtcaagccttttggcaccggaccttctactgaggcttccactcctctcggagtttaa

SEQ ID NO: 89 - protein, 576 aa, Saccharomyces cerevisiae
MSNESTRVTVSRGCTASDECAQALERTNDELDRESSVSESRSDEESHEKLSRRRFPTLGIGIWLDLKDRIPYYKSDWVDAFNYRVIPSIVDTYFNNLLPAIAFAQDMFDRTDNSYGVNEVLLSSAMAGIVFGVLGGQPLCIVGVTGPISIFNYTVYEIIKPLNTSYFGFMFWICMWSMIFHLVLAFTNAVCLLQYVTTFPCDIFGLFINVVYIQKGIQILTRQFSAKSGEKSVQDGFASVVVALVMTAFGLFFKLFHYYPLFSHRIRTFISDYSTALSVLFWSSFTHFGGYLHDVKFKKLPITKAFFPTSKVNRPQNTWLAYEPIPVKDVFIALPFGIFLTILFYFDHNVSSLMAQRHQYKLKKPSSFHYDFALLGLTTCISGVLGIPAPNGLIPQAPLHTETLLVRDSNQKVISCVEQRFTNTFQGLMILGTMTRPLLVCLGEIPQAVLSGLFFIMGINGLMTNSIIQRLVFLFSDPNRRDNTSPLMKVSKKSMLIFLSFSLTGFAGEFAITNTIAAIGFPLVLLLSVLVSFSFAYIFPTEELKILDTNVAQKFTIKNLLLENIRDAKFCDKHED

SEQ ID NO: 90 - DNA, 1731 bp, Saccharomyces cerevisiae
atgtcgaatgagagcacacgagttaccgttagtcgcggttgtacagcctccgacgagtgtgcgcaagcattggaacggacaaacgatgagctagacagagaatcatcggtatcagaaagtagaagtgatgaagagagccacgagaagttatcccgacgtcgattcccgacgctaggtataggcatatggctcgatttgaaggacagaataccgtattacaagtcagattgggtagatgcgtttaattacagagttattccctctattgttgacacctactttaataacctgctacctgcaatagcctttgcgcaagatatgtttgataggactgataattcctatggtgtgaacgaagtacttctatccagtgcaatggctggaattgtttttggagttcttggtggacagcccttatgtatagtgggtgttactggccccatctctatttttaattatacggtctacgaaattataaagcctttgaataccagctattttggcttcatgttttggatttgtatgtggtctatgatttttcatttagttttagcatttacgaacgccgtttgcctcttgcaatacgtgactacgttcccatgtgacatatttggattatttattaatgtggtctacattcaaaaaggaatacaaattttaacaagacagttcagtgctaaatcaggggagaaatcagtacaagacggatttgctagtgtcgtggtggcgctggttatgactgcgtttggtcttttctttaaattatttcattattaccccctcttttctcataggatcagaacattcatatctgattattcaactgcgctttcagtgctattctggtcatcatttacacattttggtggctacttgcatgatgtcaaatttaaaaaattgcctattacgaaagctttttttcctacttccaaagtcaataggcctcaaaatacttggctggcatatgaaccgattcctgttaaagacgtctttattgccctaccatttggtatatttttaacaatcttgttttactttgatcataacgtatcgtcgctaatggcacaaaggcatcagtataagctgaaaaaaccatcctcttttcattacgatttcgcactattgggacttaccacttgcatcagcggggttctaggaatcccggcgcccaatggtttgattcctcaagcaccattgcacacagagacactgctagttagggattcaaaccaaaaggttatcagttgcgtagagcaaagatttacaaatacgtttcagggcctgatgattctagggacaatgacaagaccgttattggtatgcttaggagaaatccctcaggcagtactttccggattgtttttcattatgggcatcaatggcctaatgacaaatagtattatacaacggttggttttcctgttttcagaccctaacagaagagataatacttcacctttaatgaaagtatccaagaagtcaatgctgatatttctttcctttagcctgacggggtttgctggtgaatttgctatcacaaatactatagcggccatcggctttcccttagtattgcttttaagtgtgttagtttctttctcgtttgcttatattttcccgactgaagaattaaagattctcgatactaatgtggcacaaaaatttaccattaaaaatttgttattggaaaatattcgtgatgcaaagttctgtgataagcatgaagactaa

SEQ ID NO: 91 - protein, 911 aa, Homo sapiens
MEELQDDYEDMMEENLEQEEYEDPDIPESQMEEPAAHDTEATATDYHTTSHPGTHKVYVELQELVMDEKNQELRWMEAARWVQLEENLGENGAWGRPHLSHLTFWSLLELRRVFTKGTVLLDLQETSLAGVANQLLDRFIFEDQIRPQDREELLRALLLKHSHAGELEALGGVKPAVLTRSGDPSQPLLPQHSSLETQLFCEQGDGGTEGHSPSGILEKIPPDSEATLVLVGRADFLEQPVLGFVRLQEAAELEAVELPVPIRFLFVLLGPEAPHIDYTQLGRAAATLMSERVFRIDAYMAQSRGELLHSLEGFLDCSLVLPPTDAPSEQALLSLVPVQRELLRRRYQSSPAKPDSSFYKGLDLNGGPDDPLQQTGQLFGGLVRDIRRRYPYYLSDITDAFSPQVLAAVIFIYFAALSPAITFGGLLGEKTRNQMGVSELLISTAVQGILFALLGAQPLLVVGFSGPLLVFEEAFFSFCETNGLEYIVGRVWIGFWLILLVVLVVAFEGSFLVRFISRYTQEIFSFLISLIFIYETFSKLIKIFQDHPLQKTYNYNVLMVPKPQGPLPNTALLSLVLMAGTFFFAMMLRKFKNSSYFPGKLRRVIGDFGVPISILIMVLVDFFIQDTYTQKLSVPDGFKVSNSSARGWVIHPLGLRSEFPIWMMFASALPALLVFILIFLESQITTLIVSKPERKMVKGSGFHLDLLLVVGMGGVAALFGMPWLSATTVRSVTHANALTVMGKASTPGAAAQIQEVKEQRISGLLVAVLVGLSILMEPILSRIPLAVLFGIFLYMGVTSLSGIQLFDRILLLFKPPKYHPDVPYVKRVKTWRMHLFTGIQIICLAVLWVVKSTPASLALPFVLILTVPLRRVLLPLIFRNVELQCLDADDAKATFDEEEGRDEYDEVAMPV

SEQ ID NO: 92 - DNA, 3635 bp, Saccharomyces cerevisiae
cagcggctgcaggacttcaccaagggaccctgaggctcgtgagcagggacccgcggtgcgggttatgctgggggctcagatcaccgtagacaactggacactcaggaccacgccatggaggagctgcaggatgattatgaagacatgatggaggagaatctggagcaggaggaatatgaagacccagacatccccgagtcccagatggaggagccggcagctcacgacaccgaggcaacagccacagactaccacaccacatcacacccgggtacccacaaggtctatgtggagctgcaggagctggtgatggacgaaaagaaccaggagctgagatggatggaggcggcgcgctgggtgcaactggaggagaacctgggggagaatggggcctggggccgcccgcacctctctcacctcaccttctggagcctcctagagctgcgtagagtcttcaccaagggtactgttctcctagacctgcaagagacctccctggctggagtggccaaccaactgctagacaggtttatctttgaagaccagatccggcctcaggaccgagaggagctgctccgggccctgctgcttaaacacagccacgctggagagctggaggccctggggggtgtgaagcctgcagtcctgacacgctctggggatccttcacagcctctgctcccccaacactcctcactggagacacagctcttctgtgagcagggagatgggggcacagaagggcactcaccatctggaattctggaaaagattcccccggattcagaggccacgttggtgctagtgggccgcgccgacttcctggagcagccggtgctgggcttcgtgaggctgcaggaggcagcggagctggaggcggtggagctgccggtgcctatacgcttcctctttgtgttgctgggacctgaggccccccacatcgattacacccagcttggccgggctgctgccaccctcatgtcagagagggtgttccgcatagatgcctacatggctcagagccgaggggagctgctgcactccctagagggcttcctggactgcagcctagtgctgcctcccaccgatgccccctccgagcaggcactgctcagtctggtgcctgtgcagagggagctacttcgaaggcgctatcagtccagccctgccaagccagactccagcttctacaagggcctagacttaaatgggggcccagatgaccctctgcagcagacaggccagctcttcgggggcctggtgcgtgatatccggcgccgctacccctattacctgagtgacatcacagatgcattcagcccccaggtcctggctgccgtcatcttcatctactttgctgcactgtcacccgccatcaccttcggcggcctcctgggagaaaagacccggaaccagatgggagtgtcggagctgctgatctccactgcagtgcagggcattctcttcgccctgctgggggctcagcccctgcttgtggtcggcttctcaggacccctgctggtgtttgaggaagccttcttctcgttctgcgagaccaacggtctagagtacatcgtgggccgcgtgtggatcggcttctggctcatcctgctggtggtgttggtggtggccttcgagggtagcttcctggtccgcttcatctcccgctatacccaggagatcttctccttcctcatttccctcatcttcatctatgagactttctccaagctgatcaagatcttccaggaccacccactacagaagacttataactacaacgtgttgatggtgcccaaacctcagggccccctgcccaacacagccctcctctcccttgtgctcatggccggtaccttcttctttgccatgatgctgcgcaagttcaagaacagctcctatttccctggcaagctgcgtcgggtcatcggggacttcggggtccccatctccatcctgatcatggtcctggtggatttcttcattcaggatacctacacccagaaactctcggtgcctgatggcttcaaggtgtccaactcctcagcccggggctgggtcatccacccactgggcttgcgttccgagtttcccatctggatgatgtttgcctccgccctgcctgctctgctggtcttcatcctcatattcctggagtctcagatcaccacgctgattgtcagcaaacctgagcgcaagatggtcaagggctccggcttccacctggacctgctgctggtagtaggcatgggtggggtggccgccctctttgggatgccctggctcagtgccaccaccgtgcgttccgtcacccatgccaacgccctcactgtcatgggcaaagccagcaccccaggggctgcagcccagatccaggaggtcaaagagcagcggatcagtggactcctggtcgctgtgcttgtgggcctgtccatcctcatggagcccatcctgtcccgcatccccctggctgtactgtttggcatcttcctctacatgggggtcacgtcgctcagcggcatccagctctttgaccgcatcttgcttctgttcaagccacccaagtatcacccagatgtgccctacgtcaagcgggtgaagacctggcgcatgcacttattcacgggcatccagatcatctgcctggcagtgctgtgggtggtgaagtccacgccggcctccctggccctgcccttcgtcctcatcctcactgtgccgctgcggcgcgtcctgctgccgctcatcttcaggaacgtggagcttcagtgtctggatgctgatgatgccaaggcaacctttgatgaggaggaaggtcgggatgaatacgacgaagtggccatgcctgtgtgaggggcgggcccaggccctagaccctcccccaccattccacatccccaccttccaaggaaaagcagaagttcatgggcacctcatggactcaggatcctcctggagcagcagctgaggccccagggctgtgggtggggaaggaaggcgtgtccaggagaccttccacaaagggtagcctggcttttctggctggggatggccgatggggcccacattagggggtttgttgcacagtccctcctgttgccacactttcactggggatcccgtgctggaagacttagatctgagccctccctcttcccagcacaggcaggggtagaagcaaaggcaggaggtgggtgagcgggtggggtgcttgctgtgtgaccttgggtaagtcccttgacctttccaggcctatatttcctcttctgtaaaatgggtatattgatgataatacccacattacaggatggttactgaggaccaaagatacatgtaaaatagggctttgtaaactccacagggactgttctatagcagtcatcatttgtctttgaacgtacccaaggtcacatagctgggatttgaactgagccgtgcagctgggatttgaaccaggccttctgatttcaaggtccgagctctgtcctctgtcagtcatgcgtccactttcccttcccctgtgactcctcccttccccactctgctcccagcccctaccttgagaccctcttctctgggcccagagagaggcgtcctgggtgaaggaaggtacaggcaggatgatccagggattgggc

SEQ ID NO: 93 - protein, 955 aa, Oryctolagus cuniculus
MKLPGQEELEAACACENVPVGQLDSGPSSGPCPDDPSDTGSRELGPPEDPPLFLQLNELLGWPQTLEWREMGRWVLFEEKLEVDAGRWSAPHVPTLALPSLQNLRSLLAEGLVLLDCPAQNLLELVEQVTRVESLSPELRGQLQALLLQRPQHHTQTTGSRPCWGPAQSRKAAHNKEAPMQQQCQSPLRQKLPPGAEAGAVLAGELGFLAQPLAAFVRLRDPVWLGPLTEVPLPSRFFCLLLGPPMLGKGYHELGRAAAVLLSDPHFQWSVRRASNLHDLLTALDAFLEEVTVLPPGRWDPTARIPPPRCLPSRHKRPPLHLQKVKGLSVPHRTQAEDRHRNGPLAPSPELQRTGRLFGGLVQDVRRKASWYPSDFSDALHPQCVSAVLYIYLATVTNAITFGGLLGDATDGAQGVLESLLGTAVAGAAFCLMAGQPLTVLSSTGPVLVFERLLFAFCRDYSLDYLPFRLWVGIWVAVFCLALVATEASVLVRYFTRFTEEGFCALISLIFIYDAVGKMLNLAHAYPIQRPGSLAYGCLCQFPGPGGNESQWTRPRPQSRDDLLSVDLGLVNASLLPPHECVQQGGYPRGPGCHTVPDIAFFSLLLFLTSFLFAIALKHMKTSRFFPSVVRKVLSDFSSILAILLGCGLDALLGLAMPKLMVPREFKPTLPGRGWLVPPFGANPWWLSVAAALPALLLSILIFMDQQITAVILNRVEYRLRKGAGFHLDLFCVALLMLLTSVLGLPWYVSATVLSLAHMDSLRRESRACAPGEPHSFLGIREQRLTGLAVFTLTGVSIFLAPVLKFIPMPVLYGIFLYMGVAALSSIQFMKRVQLMLMPAKHQPDLLLLRHVPLSRVHLFTAIQLACLGLLWIIKSTPAAIIFPLMLLGLVGVRKALEWVFSPQELLWLDELMPEEERNVPEKGLEPGHSFSGSDSEDSELMYQPKAPEINISVN

SEQ ID NO: 94 - DNA, 3159 bp, Oryctolagus cuniculus
agctgtgccgctcccagcatgaagctgccaggtcaggaggagctggaagccgcctgtgcttgtgaaaatgtgcctgtgggacagctggacagcggccccagctctggcccctgccctgatgacccctcagacacaggcagcagggaactggggcctcctgaggaccctccactcttcctccagctgaatgagctgctgggctggccccagacactggagtggagggagatgggcaggtgggtgctgtttgaggagaagctggaggtggatgcaggccgctggagcgccccccacgtgcccaccctggcgctgccgagcctccagaatctccgaagcctgctggccgagggccttgtcctgctggactgtccagctcagaacctcctggagcttgtggagcaggtgaccagggtggagtcgctgagcccggagctgagggggcagctgcaggctttgctgctacagagaccccagcatcatacccagaccacaggctccaggccctgctggggacctgcccagtcaaggaaggctgctcacaacaaggaagcccccatgcagcaacagtgtcagagccccctgagacagaagctgcctccgggggccgaggcaggggctgtcctggcaggagagctgggcttcttggcacagccactggcagccttcgtgcgactccgggatcccgtgtggctggggcccctcactgaggtgcccctccctagcaggtttttctgtctcctcctgggtcctcccatgctgggaaaaggctaccacgagctgggtcgggcggcagctgtcctcctcagtgacccgcacttccagtggtcagttcgtcgggccagcaaccttcatgacctcctcacagccctggatgccttcctggaggaggttactgtgctgccccctggcaggtgggacccgacagcccggattccccctcccaggtgtctgccctctcggcacaaaaggccacccttgcacctgcagaaggtcaagggcctctctgtcccacataggacccaggcagaggacaggcaccgaaatgggccacttgcaccaagcccagagttgcagcggacgggcaggctctttgggggccttgtccaggacgtgcgccggaaagcctcgtggtaccccagcgatttctcggatgccctgcacccccagtgtgtctcagctgtgctctacatttacctggctaccgtcactaatgccatcacttttgggggtctcctgggagatgccacggatggtgcccagggagtgctggagagtctcctgggcacagcggtggctggagctgccttctgcctcatggcaggccagcctctcaccgtcctcagcagcaccgggccagtgctcgtctttgagcgcctgctctttgccttctgcagagattacagcctggactacctgccctttcgcctgtgggtgggcatctgggtggccgtcttttgcctggcgctggtagccacagaggccagcgtgctggtgcgttacttcacccgcttcactgaggaaggtttctgtgccctcatcagcctcatcttcatctacgatgctgtgggcaaaatgctgaacttggcccatgcctatcccatccaaaggcctgggtcccttgcctatggctgcctctgtcaattcccaggcccaggaggaaatgaatcgcagtggacaaggccaaggccacaaagcagagatgacctcttaagcgtggacctaggcctggtcaatgcatccctgctgcctccacacgagtgtgtccagcagggcggctatccacgtggccctggctgtcatacagtccccgacatcgccttcttctcccttctcctcttccttacctccttcctctttgccattgccctcaagcatatgaagaccagccgcttcttcccctctgtggtacgcaaggtgctcagcgacttttcctccatcctggccatcctgctgggctgtggacttgatgccctcctgggcttggctatgccaaagctcatggtgcccagagagttcaagcccacactccccggccgtggctggctggtgccaccttttggagccaacccctggtggctgagtgtggcagctgccctgcctgcgctgttgctgtcaatcctcatcttcatggaccagcagatcacagcagtcatcctcaaccgtgtggaatacagactgcggaagggagctggcttccacttggacctcttctgtgtggcgctgctgatgctgctcacttcagtgctcgggctgccatggtatgtctcagccactgtcctctccctggcccacatggacagtcttcggagggagagccgagcttgtgcccctggggagccccacagcttcctgggcatcagggagcagaggctgacaggcctggcggtgttcaccctcacaggagtctccatcttcctggcacctgtgctcaagttcatcccaatgcctgtgctctacggcatcttcctgtacatgggggtggcagcactcagcagcatccagttcatgaagagagtgcagctaatgctgatgccagcaaaacaccaaccagacctgctgctcctgcggcatgtgcctctgagcagggtccacctcttcacagccattcagctggcctgcctgggtctgctttggataatcaagtctacccctgcggccatcatcttccccctcatgttgctgggcctggtgggggtccgaaaggcactggagtgggtcttctcaccccaggaactcctctggctggatgagctgatgccagaggaggagaggaatgtccctgagaaggggctggagccggggcattccttcagcggaagtgacagcgaagattcagaactgatgtaccagccaaaggctccagaaatcaacatctccgtgaattagctggaaaaagaatctgggagcgaagaccccaggaaactcagcatgagctctctgctatgacctggaaaagcccaagtcttgggctcctgcacctgcatgggagacctggagaaagcttctggatcctggctttggattggcccagctctagccattgcgaccatttggggagtgaaccagtggatggaagacctccctctctctctctctctttctctctgcctctctataactctgactttcaaataaataaataaatctttttttttaaaa

SEQ ID NO: 95 - protein, 690 aa, Saccharomyces cerevisiae
MNVLVYNGPGTTPGSVKHAVESLRDFLEPYYAVSTVNVKVLQTEPWMSKTSAVVFPGGADLPYVQACQPIISRLKHFVSKQGGVFIGFCAGGYFGTSRVEFAQGDPTMEVSGSRDLRFFPGTSRGPAYNGFQYNSEAGARAVKLNLPDGSQFSTYFNGGAVFVDADKFDNVEILATYAEHPDVPSSDSGKGQSENPAAVVLCTVGRGKVLLTGPHPEFNVRFMRKSTDKHFLETVVENLKAQEIMRLKFMRTVLTKTGLNCNNDFNYVRAPNLTPLFMASAPNKRNYLQEMENNLAHHGMHANNVELCSELNAETDSFQFYRGYRASYDAASSSLLHKEPDEVPKTVIFPGVDEDIPPFQYTPNFDMKEYFKYLNVQNTIGSLLLYGEVVTSTSTILNNNKSLLSSIPESTLLHVGTIQVSGRGRGGNTWINPKGVCASTAVVTMPLQSPVTNRNISVVFVQYLSMLAYCKAILSYAPGFSDIPVRIKWPNDLYALSPTYYKRKNLKLVNTGFEHTKLPLGDIEPAYLKISGLLVNTHFINNKYCLLLGCGINLTSDGPTTSLQTWIDILNEERQQLHLDLLPAIKAEKLQALYMNNLEVILKQFINYGAAEILPSYYELWLHSNQIVTLPDHGNTQAMITGITEDYGLLIAKELVSGSSTQFTGNVYNLQPDGNTFDIFKSLIAKKVQS

SEQ ID NO: 96 - DNA, 2073 bp, Saccharomyces cerevisiae
atgaatgtattagtctataatggcccagggactacgccaggatcagttaagcatgctgttgaaagtttacgtgactttttggaaccctattacgccgtcagtactgtcaatgttaaggtattacagacagaaccatggatgtcaaagacctccgctgtagtttttcctggtggtgccgatcttccttacgttcaagcttgtcaacccattatttctcgattgaaacattttgttagcaaacaaggtggtgtctttatcggattttgtgcaggaggttactttggcaccagccgtgtagaatttgctcaaggtgaccctacaatggaagtatcaggaagcagggatttgcgattctttccgggaacaagcagaggacctgcgtacaatggatttcagtataacagcgaggccggtgcacgtgcagttaaattgaatcttccagatggctcacagttctcaacttatttcaatggaggagccgtttttgttgatgcagataaatttgataatgtcgagatcttggccacgtacgcagaacacccggatgtgccttcttctgactcaggaaaaggtcaaagtgaaaacccagctgctgtagtgctatgtacggtcggaagaggaaaggttttactcactggaccacaccctgaattcaacgtccgttttatgaggaaatccacagataagcattttcttgaaaccgttgtggaaaacctgaaagcacaggaaatcatgaggttgaaatttatgagaacggttcttaccaaaactgggttgaattgtaataatgacttcaattatgtaagagctccaaatttgacaccactgtttatggctagtgcacctaataagcggaattacttgcaagaaatggaaaacaacttagctcatcatggaatgcatgcaaataatgttgaactctgctcagaattaaacgccgaaactgactctttccaattttatagaggctatagagcctcttacgatgcagcaagttcgtccttgcttcataaagagccagatgaggttcctaagaccgtaatatttcctggcgtagatgaagatattccaccatttcaatatacgcccaattttgacatgaaagaatacttcaagtatctgaatgttcaaaacaccataggttctttacttctatatggtgaagttgttacatcaacgagtaccatattgaataataataaatccttattaagttcgatccctgaaagcactttacttcacgtgggtactattcaggtttctgggcgtgggagaggtggtaacacttggattaatcctaaaggtgtttgcgcatcaacggccgtcgtaacaatgccgcttcaatcgcctgtgactaatcgaaatatatcagttgtttttgtccagtatctttctatgcttgcttactgtaaggcgatactttcgtacgctcctggattttcagatattcctgttaggatcaaatggcccaatgacctttatgctttgagccccacctactataagcgtaaaaacttgaaattggttaacaccggttttgagcatacaaagttgcccttaggtgatatcgagcccgcttatcttaagatctctggtttattagttaatacccacttcataaacaataaatattgtttgctacttggctgtggtataaatttgactagtgatggtcctacaacttcattacaaacttggattgatatcctgaatgaagaacgccaacaattacaccttgatttattgccagcaataaaggcagaaaagctgcaggcactctatatgaataaccttgaggtcatattaaaacagtttattaactacggagctgcggaaatattgccaagttattatgagttgtggttacatagtaaccaaatagtaacattaccagatcacggaaatacgcaagccatgattactggtatcacggaagactacggtttactgattgcaaaagaattggtaagcggtagttccactcaatttacaggaaacgtttataatttacagccggacggtaacacttttgatatcttcaagagcttaattgctaaaaaggttcagagttaa

SEQ ID NO: 97 - protein, 593 aa, Saccharomyces cerevisiae
MTISNKSWRSYFPHLRKLPEDDQYLYSDDTNSSIIAEEELHHSVDKSSKTDVTAETTAVEPHPHNLRHDLPYEVRDEAGRKWWKYFDEFEYRVNKEYKKSRKWYEFLYPNHTTQTKAERRLLYKLDIIIALYFFMLCWSKSVDLNNYTNAYVSNMKEDLNMKGNDYVYTSTIANVGAIVFQLPFMYLLPRFPSHIILPVMDLGWTWFTFACYRANSLAELRAYRFILSAFGAAYYPVSQYILGCWYAPDEINSRVCLFFCGQQLGSVTSGLLQSRIFKSLNGVHGLAGWRWMFLIDAIAISLPTAIIGFFVIPGVPSKCYSLFLTDEEIRIARARNKRNQIKDGVDKSKLAPLWSRKLWKKVFCTPAFWVLVVFDTCSWNNMTAYSGSYTLWLKSNTKYSIAQVNNLSVIPACLGFAYVIFCAFGADLFRCKWIFMVFAAIMNTVSCALLIKWDIPSKAKWYAFFTTYFSVAASPCLWSFINDFLRFDPQVKAITWIAIYSFSQSTYAWIPTLAWPTVESPRFKTGYTVSLIFGAIYGLWTFVVLFFYKRNEKKHALGNGIILYDSNKGEELPEFVKKNMEERDGYYYLKRSS

SEQ ID NO: 98 - DNA, 1782 bp, Saccharomyces cerevisiae
atgacaatttcgaataaatcgtggaggagctacttcccacatttgagaaaactacccgaagatgatcagtacttatactcagacgatactaactccagtatcatagctgaagaggagctacatcatagcgtagataagtcctcgaagacagacgttacggcagaaactacagctgtagaacctcatcctcacaatttaaggcatgacttgccatatgaagtgagagatgaagctgggcgtaaatggtggaaatattttgatgaattcgagtatcgtgttaataaggaatacaagaaatcacgtaagtggtacgagtttttgtatcctaatcatactactcaaaccaaggctgaaagacggcttctttacaagctagacattattattgctttatacttttttatgttatgttggtccaagtcagtggatttgaataactacactaacgcatatgtttccaatatgaaggaagatttaaacatgaaaggtaatgattacgtttacacttctactattgctaatgttggtgccattgtcttccaattaccatttatgtatttgttaccaagatttccctctcatattattttgcctgtaatggacttgggctggacttggttcacatttgcatgttatagggcaaactcactagccgaactaagggcttacagatttattttaagtgcctttggcgctgcttactacccagtgtcccaatatatactaggttgttggtatgccccagatgaaattaattcaagagtctgtttattcttttgtgggcaacaattgggttccgtgacttcaggacttctgcaaagtcgcatattcaaaagtttgaacggcgtccatggtctagcaggctggagatggatgtttctgatcgatgccattgcaatttctcttcccacggctattattggtttttttgttattcccggtgtaccatctaagtgttactctttatttctgactgacgaagaaatacgaattgcaagggccagaaataagaggaaccaaatcaaagatggtgttgataaaagtaagctagccccattatggagcagaaaactttggaagaaagtattttgtactccagcattctgggtacttgttgtttttgatacatgttcgtggaataacatgactgcgtatagtggttcatatactttgtggttaaagtctaatacaaagtactccattgcccaagtgaacaacctgagtgttatacccgcatgtttaggatttgcgtatgtgattttttgtgcctttggtgccgatttatttagatgtaagtggatattcatggtttttgctgctataatgaataccgtttcttgtgccttacttatcaagtgggatattccttcgaaagctaaatggtacgctttcttcaccacgtatttcagtgtggccgcatcgccttgtctatggtcgtttattaatgacttcttaaggtttgatcctcaggtgaaggctattacatggatcgccatttattccttctctcaatccacttacgcctggattcctaccttggcgtggcctaccgtggagtcaccacgttttaagactggttacaccgtgagcttaatttttggtgctatttacggtttatggacgtttgttgtactttttttttacaagagaaacgaaaagaaacatgctctaggtaatggtatcatcttgtatgatagtaataagggtgaagagcttccagaatttgtaaagaaaaatatggaggaaagagatggttactactatttaaagcggtcctcgtag

SEQ ID NO: 99 - protein, 221 aa, Saccharomyces cerevisiae
MSATESSSIFTLSHNSNLQDILAANAKWASQMNNIQPTLFPDHNAKGQSPHTLFIGCSDSRYNENCLGVLPGEVFTWKNVANICHSEDLTLKATLEFAIICLKVNKVIICGHTDCGGIKTCLTNQREALPKVNCSHLYKYLDDIDTMYHEESQNLIHLKTQREKSHYLSHCNVKRQFNRIIENPTVQTAVQNGELQVYGLLYNVEDGLLQTVSTYTKVTPK

SEQ ID NO: 100 - DNA, 666 bp, Saccharomyces cerevisiae
atgagcgctaccgaatcttcatctatattcacattgagtcacaactcaaacctacaagatatcttggccgccaatgccaaatgggcctcccagatgaacaacatacagccaactttgttcccagatcacaatgcgaagggccagtcccctcacactcttttcatcggctgctccgattcgcgttacaacgaaaactgtttaggtgtcttgcccggcgaagtgttcacttggaaaaatgttgctaacatatgtcactcagaggatttaactttgaaggccactttagagtttgccattatttgtctaaaagttaacaaagttattatttgtggccacactgattgtggtggtataaagacatgtttaactaaccaaagggaagccttaccaaaagttaactgttctcatctgtacaagtacttagacgatattgacaccatgtaccatgaagagtcacaaaatttgatccatttgaaaacgcaacgtgaaaaatctcattacctgtcgcactgtaacgtcaaaaggcagtttaataggattattgaaaaccctactgtgcaaactgctgtacaaaatggagaattacaggtatacggtctgctttacaacgtagaggacggtctactgcaaacagttagcacttacacaaaagttaccccaaaatag

SEQ ID NO: 101 - protein, 488 aa, Saccharomyces cerevisiae
MLRFTNCSCKTFVKSSYKLNIRRMNSSFRTETDAFGEIHVPADKYWGAQTQRSFQNFKIGGARERMPLPLVHAFGVLKKSAAIVNESLGGLDPKISKAIQQAADEVASGKLDDHFPLVVFQTGSGTQSNMNANEVISNRAIEILGGKIGSKQVHPNNHCNQSQSSNDTFPTVMHIAASLQIQNELIPELTNLKNALEAKSKEFDHIVKIGRTHLQDATPLTLGQEFSGYVQQVENGIQRVAHSLKTLSFLAQGGTAVGTGLNTKPGFDVKIAEQISKETGLKFQTAPNKFEALAAHDAIVECSGALNTLACSLFKIAQDIRYLGSGPRCGYHELMLPENEPGSSIMPGKVNPTQNEALTQVCVQVMGNNAAITFAGSQGQFELNVFKPVMIANLLNSIRLITDAAYSFRVHCVEGIKANEPRIHELLTKSLMLVTALNPKIGYDAASKVAKNAHKKGITLKESALELGVLTEKEFDEWVVPEHMLGPK

SEQ ID NO: 102 - DNA, 2489 bp, Saccharomyces cerevisiae
taatcacttctacgagtctagtagatctcttctccttcctataagtggttaatgtattcttcgagaagctcatcatttttttttttcattttttttttttttttcagttttctacaatttcatcaaatcaatggttaaaccgggcagaaaaactaccaagcgttacttttactgatgttagtactactaccgcagttattgcgactactacattaactataactatacaagaaaaaaagtaaagagggctcgtaaagcaaagcttggtatctcctacatagtcaatacatagtagtgagtcgcctatagccattctgtaatgccatttgttaagacgtgtccttaaacccttccgaatcgccgcgggcgacatcataatgtcagtacctaataatggttattattcgtaccctgtggttagagagctatggaagctagcagtaaatgtctctagttcttgctatcactaccatattggagaggcttcaggcccctcccctgagccgatcctcggaatgactaccccgattcccggaatgggcgttcgatgattggctctttcctgtaaagcctttttgcgtttcttataggctatatataatcttcatcactgttgtagacgttaaacaagcatccaacaggaggccggaccgaacacacgggggagtgactctagctctttcttctgggatattcatatcgtttctccattacatacagtcatttttttgcatttttaaattcgtgacttttagtactgcagctgttttttttctcacgtcaagaaattccataaagtctaactattaaacggataagagatacaatcatgttgagatttaccaattgtagttgcaagactttcgtaaaatcgtcatataagcttaatataagaagaatgaactcctcgttcagaactgaaaccgatgcatttggtgagatacacgtgcctgctgataagtactggggtgcccaaactcaaagatcctttcaaaacttcaagattggtggcgctcgtgaaagaatgccattgcctttggtgcatgcatttggtgttttgaagaaatctgccgcgattgtgaatgagtctctggggggattggatcccaagatctccaaggctattcaacaggccgctgacgaagtggcttctggtaagctagacgaccactttccattggttgttttccaaacgggttccggtacccagtctaacatgaatgctaatgaagttatttccaatcgtgccattgagatcctaggaggcaagattggatctaaacaagtccatccaaacaatcattgcaaccaatctcaatcatccaatgatactttccccactgtcatgcatatcgctgccagtttgcaaattcaaaacgagttgatacctgagttgaccaatttaaagaacgcccttgaagccaaatccaaggaatttgaccatattgtgaagatcggtagaacacacttgcaagatgccacgcctttgacactaggtcaagagttttccggttacgtgcaacaagttgagaacggtatccaaagagtggcacattctttgaaaacattgagtttcctggcacaaggtggtactgccgttggtacagggttgaacaccaagcccggattcgatgtcaagatagccgagcaaatttccaaagaaactggactaaagtttcaaaccgcccctaataagttcgaggctttggctgctcacgacgccattgtcgaatgtagcggtgctctaaacacccttgcttgttctcttttcaaaatagcgcaagatataagatacttagggtccgggccacgttgcggctaccatgaactaatgctgccagagaatgaaccaggttcctcaatcatgcctggtaaagttaacccaacccaaaacgaggcattgactcaagtgtgtgtgcaagtcatgggtaacaatgcagctatcacgtttgccggctctcaaggtcaattcgagttaaatgtcttcaagccagtcatgatcgccaatctattgaattcgatcaggttaattactgatgccgcatattcatttagagtgcactgtgttgaaggtatcaaagccaatgagcctcgtattcatgagttgttgactaaatctttaatgttagtcaccgctttgaaccctaagatcggttatgatgccgcttccaaggtcgccaagaatgctcataagaagggcattaccttgaaggaaagtgcattggaattgggtgtattgactgaaaaggaatttgatgaatgggttgttcctgaacacatgctaggtcctaaataaacgagctaaatacctaataatatacaagttttttatgtcttattatatgaaggaaaataaggaagtggagagaatttgtgattcagcaatggtccctccgctaaggtcccgcctctggccagttatgtcagaagaggagcataggcatacattccatttttgatggcttaatggggcccataaatttacatca

SEQ ID NO: 103 - protein, 501 aa, Saccharomyces cerevisiae
MIRSVRRVFIYVSIFVLIIVLKRTLSGTDQTSMKQPVVVIGSGLAGLTTSNRLISKYRIPVVLLDKAASIGGNSIKASSGINGAHTDTQQNLKVMDTPELFLKDTLHSAKGRGVPSLMDKLTKESKSAIRWLQTEFDLKLDLLAQLGGHSVPRTHRSSGKLPPGFEIVQALSKKLKDISSKDSNLVQIMLNSEVVDIELDNQGHVTGVVYMDENGNRKIMKSHHVVFCSGGFGYSKEMLKEYSPNLIHLPTTNGKQTTGDGQKILSKLGAELIDMDQVQVHPTGFIDPNDRENNWKFLAAEALRGLGGILLHPTTGRRFTNELSTRDTVTMEIQSKCPKNDNRALLVMSDKVYENYTNNINFYMSKNLIKKVSINDLIRQYDLQTTASELVTELKSYSDVNTKDTFDRPLIINAFDKDISTESTVYVGEVTPVVHFTMGGVKINEKSQVIKKNSESVLSNGIFAAGEVSGGVHGANRLGGSSLLECVVFGKTAADNIAKLY

SEQ ID NO: 104 - DNA, 2657 bp, Saccharomyces cerevisiae
ctatggaaaattattcaaacatttagaagaggcactatttcgaatgaccatcacaagcattataatcttcaaacatgtccgagctgcagatatgaagtaaaatagtgatcgggactcatttttttttcttctatgatatcatattgtcccgttcgttattaaatgtaattcttccaccgtactagttatcgaaggcaagatctcctttttacgcttaggtagattacatagatttcataatgtacaccaatacaaatgtatcttatacactcgtcaaatcttatatgaatcatgcaggagtagctctcgttttctttttacgagctacttgaaaaaaaaaaactagcgaaaatcctttgcttagaaatccagatttaaaacaaaaccgccgaaaagggaaagattttatgataggaaataccttaataattctatatcatcccgagtcttaggaaaatgattagatctgtgagaagggttttcatttacgtctcaatattcgtattgataatagttttgaaaagaacattaagtggcacagatcaaacgtcaatgaaacaaccagtggtggtcattggctctggtttggcaggcttaaccacaagtaatcgtctcattagtaaatacagaattcctgttgtgcttttggataaggcggcttctattggtgggaattctataaaggcttctagtggtattaatggtgctcacacagacactcaacaaaatttaaaggtaatggacactcccgaattgtttttgaaagatactttgcattcggctaaaggcagaggggttccatcactgatggataagttgactaaggaatccaagagtgctatcaggtggttgcaaacagaattcgatttgaaattagacctccttgcgcaattgggcggtcactctgttccaaggacccatagatcttctggcaaattaccaccaggttttgaaatcgtgcaagcgttatcaaaaaaactaaaggatatctcttccaaagattccaatctcgtgcagattatgctaaacagtgaagtagtggatatcgagcttgataatcaaggtcatgttactggtgtagtatatatggacgagaacggaaaccgtaaaatcatgaagtcacaccatgtcgtgttttgctcaggtggatttggttactctaaggaaatgttgaaagagtactcaccaaatttgattcacttgccaactactaatggcaaacagactacaggtgatggtcaaaaaatcctttcaaagttgggtgccgaattgattgatatggatcaagtgcaggtacaccctaccggcttcattgatccaaatgaccgtgaaaataactggaagtttttggctgcagaggcattgaggggtttaggcggcatcttattgcatcccaccactggaagaaggtttacaaatgaattgagcaccagagatacagtaaccatggaaatacagtctaaatgtccgaaaaatgataatagagcacttttggtaatgagcgacaaagtctacgagaactatacgaataacataaacttttatatgtccaaaaacttaatcaaaaaagtgtcaatcaacgatctgatccgacaatatgacctacaaactacagcttctgaactggtaactgaactgaagagctattccgatgttaatactaaggatacgtttgataggccattgattatcaatgcctttgataaagatatttcgactgaatcaactgtttatgttggggaagttacaccagttgttcatttcacaatgggtggtgtgaaaattaatgagaaatctcaggtaattaagaaaaattcggaaagcgttctatctaatgggatatttgctgctggtgaagtttcgggtggtgttcatggagccaacagattgggtggatctagtttgttagagtgtgttgtctttggaaagacagctgcggataacatagcaaaattgtactgagaatttatagggaaataaaagatatttttgcaacgtactttacatttcaataattaatgcgacatgataggatatactgtttgctatttctttccgtaacgatatacgattttttcttttctttggagttccaaatgaagaatatatcttgttgggaaaagctatagtattaggtttacagaatatggtagaggtttctccccgacgatataggaatctacaagagagagcatgattctacacgataatactgcaatttcttctttgcgttgaagtgtcaccattgcctatccttttacattatcaatgtcaatgttccctcttctaacaaactgaatgacttttctacacgattcatattatcttcttgcgcagtaaattatgttaacgtaatagtagggtctcttgtgcttcattattttgtaactgtacacataattgacacgtttaacaattagtgagcgcaagtggtttagtggtaaaatccaacgttgccatcgttgggcccccggttcgattccgggcttgcgcagtttcttttctttttttctggaaaataagaaaacttatttatggaagcaaaaatggaataaaggattgggacgaagttagtgaaaaaaaactgaaatagtcctagagtaactccgaagtgtctttgtataagctattatctagaaatcacgagaggggaagaa

SEQ ID NO: 105 - protein, 470 aa, Saccharomyces cerevisiae
MSLSPVVVIGTGLAGLAAANELVNKYNIPVTILEKASSIGGNSIKASSGINGACTETQRHFHIEDSPRLFEDDTIKSAKGKGVQELMAKLANDSPLAIEWLKNEFDLKLDLLAQLGGHSVARTHRSSGKLPPGFEIVSALSNNLKKLAETKPELVKINLDSKVVDIHEKDGSISAVVYEDKNGEKHMVSANDVVFCSGGFGFSKEMLKEYAPELVNLPTTNGQQTTGDGQRLLQKLGADLIDMDQIQVHPTGFIDPNDRSSSWKFLAAESLRGLGGILLNPITGRRFVNELTTRDVVTAAIQKVCPQEDNRALLVMGEKMYTDLKNNLDFYMFKKLVQKLTLSQVVSEYNLPITVAQLCEELQTYSSFTTKADPLGRTVILNEFGSDVTPETVVFIGEVTPVVHFTMGGARINVKAQVIGKNDERLLKGLYAAGEVSGGVHGANRLGGSSLLECVVFGRTAAESIANDRK

SEQ ID NO: 106 - DNA, 1413 bp, Saccharomyces cerevisiae
atgtctctctctcccgttgttgttattggaaccggtttggccgggctggctgctgccaatgaattggttaacaagtataacatccctgtaaccatcctcgaaaaggcttcctcgatcggtgggaactctatcaaggcctccagtggtattaacggtgcttgcaccgagactcaacgtcacttccacatcgaggactccccacgcttatttgaagatgacaccatcaagtctgctaaaggtaaaggtgtccaagaattaatggctaagttggccaatgattctcccctggctattgaatggttgaaaaacgaatttgatttgaaattggacctattggctcaattgggtggccactctgtggcaagaactcacagatcgtctgggaagttgcctccaggtttcgaaattgtttctgccttatctaacaatttgaagaaattagctgagactaaaccagagttagttaagattaacttagacagtaaagtcgtagacatccatgaaaaggatggctccatttctgctgtagtgtacgaggacaagaatggcgaaaagcacatggtgagtgctaacgatgtcgttttttgttctggagggtttggcttttctaaggaaatgcttaaagaatacgcacccgaactggtgaacttgccaacaacaaacgggcaacaaacaactggtgatggtcaaaggcttctgcagaagttaggcgctgatctgattgacatggaccaaattcaagttcatccaactgggttcattgatccaaatgaccgtagctcaagctggaaattcttggctgccgaatccttaagaggtcttggtggtatcctattaaaccctattaccggtagaagatttgtcaacgaattgaccacaagagatgtagtcactgcagctattcaaaaggtttgtcctcaagaggataacagagcactattggttatgggcgaaaaaatgtacacagatttgaagaataatttagatttttacatgttcaagaaacttgtacagaaattgacattatctcaagttgtttctgaatataatttaccaatcactgtcgcccaattatgcgaggaattgcaaacatactcttccttcactaccaaggctgatccgttgggacgtaccgttattctcaacgaatttggctctgacgttactccagaaactgtggtttttattggtgaagtaacaccggttgtccatttcaccatgggtggtgctagaatcaatgtcaaggctcaagtcattggcaagaacgacgaaaggctactaaaaggcctgtacgcggccggtgaagtttctggcggtgttcatggcgccaataggttgggtggttcaagtttgttagaatgcgttgtctttgggagaaccgcagctgaatctattgccaatgaccgcaagtaa

SEQ ID NO: 107 - protein, 633 aa, Saccharomyces cerevisiae
MSSNNNTNTAPANANSSHHHHHHHHHHHHHGHGGSNSTLNNPKSSLADGAHIGNYQIVKTLGEGSFGKVKLAYHTTTGQKVALKIINKKVLAKSDMQGRIEREISYLRLLRHPHIIKLYDVIKSKDEIIMVIEYAGNELFDYIVQRDKMSEQEARRFFQQIISAVEYCHRHKIVHRDLKPENLLLDEHLNVKIADFGLSNIMTDGNFLKTSCGSPNYAAPEVISGKLYAGPEVDVWSCGVILYVMLCRRLPFDDESIPVLFKNISNGVYTLPKFLSPGAAGLIKRMLIVNPLNRISIHEIMQDDWFKVDLPEYLLPPDLKPHPEEENENNDSKKDGSSPDNDEIDDNLVNILSSTMGYEKDEIYESLESSEDTPAFNEIRDAYMLIKENKSLIKDMKANKSVSDELDTFLSQSPPTFQQQSKSHQKSQVDHETAKQHARRMASAITQQRTYHQSPFMDQYKEEDSTVSILPTSLPQIHRANMLAQGSPAASKISPLVTKKSKTRWHFGIRSRSYPLDVMGEIYIALKNLGAEWAKPSEEDLWTIKLRWKYDIGNKTNTNEKIPDLMKMVIQLFQIETNNYLVDFKFDGWESSYGDDTTVSNISEDEMSTFSAYPFLHLTTKLIMELAVNSQSN

SEQ ID NO: 108 - DNA, 1902 bp, Saccharomyces cerevisiae
atgagcagtaacaacaacacaaacacagcacctgccaatgcaaattctagccaccaccaccaccatcaccaccatcaccaccaccatcacggtcatggcggaagcaactcgacgctaaacaatcccaagtcgtccttagcggatggtgcacatatcgggaactaccaaatcgtcaaaacgctgggagaggggtcctttggtaaagttaaattggcatatcataccactacgggccaaaaagttgctctaaaaatcattaataagaaggttttggcaaagagtgatatgcagggcagaattgaaagagaaatatcttatctgagactcttaagacacccccacatcatcaaactgtatgatgttatcaaatccaaagatgaaatcattatggttatagagtacgccgggaacgaattgtttgactatattgttcagagagacaaaatgagcgagcaagaggcaagaagatttttccagcagatcatcagtgccgtcgagtactgccataggcacaaaattgtccatagagatctgaagcctgaaaacttactactagatgagcatctgaatgtaaagattgccgattttggtttgtcaaacatcatgactgatggtaatttcttaaagacttcttgtggttctcccaattatgcggctcctgaagttatcagcggtaagctgtacgcaggcccagaagtggacgtgtggtcatgtggggttatcctttatgttatgctttgtcgtcgtctaccgtttgacgatgaaagcatcccagtgcttttcaagaatatcagcaacggtgtttacaccttgcctaaatttttatctcctggagctgctgggctaatcaaaagaatgttaatcgttaatccattgaacagaataagcattcatgaaattatgcaagacgattggttcaaagttgacctgccagaatatctacttccaccagatttgaaaccacacccagaagaagagaatgaaaataatgactcaaaaaaggatggcagcagcccagataacgatgaaattgatgacaaccttgtcaatattttatcatcgaccatgggttacgaaaaagacgagatttatgagtccttagaatcatcagaagacactcctgcattcaacgaaattagggacgcgtacatgttgattaaggagaataaatctttgatcaaggatatgaaggcaaacaaaagcgtcagtgatgaactggatacctttctgtcccagtcacctccaacttttcaacaacaaagcaaatcccatcaaaagagtcaagtagatcatgaaactgccaagcaacacgcaagaaggatggcaagtgctatcactcaacaaaggacatatcaccaatcacccttcatggatcagtataaagaagaagactctacagtttccattttgcctacatctttacctcagatccacagagctaatatgttagcacaaggttcgccagctgcctctaaaatatctcctcttgtaacgaaaaaatctaaaacgagatggcattttggtatacgatctcgctcatatccattagacgttatgggtgaaatttatattgccttgaagaatttgggtgccgaatgggccaagccatctgaagaggatttatggactatcaaattaaggtggaaatatgatattggaaacaagacaaacactaatgaaaaaatacctgatttaatgaaaatggtaattcaattatttcaaattgaaaccaataattatttggtggatttcaaatttgacggctgggaaagtagttatggagatgatactactgtttctaatatttctgaagatgaaatgagtactttttcagcctacccatttttacatttaacaacaaaactaattatggaattagccgttaacagtcaaagcaattga

SEQ ID NO: 109 - protein, 504 aa, Saccharomyces cerevisiae
MQSPYPMTQVSNVDDGSLLKESKSKSKVAAKSEAPRPHACPICHRAFHRLEHQTRHMRIHTGEKPHACDFPGCVKRFSRSDELTRHRRIHTNSHPRGKRGRKKKVVGSPINSASSSATSIPDLNTANFSPPLPQQHLSPLIPIAIAPKENSSRSSTRKGRKTKFEIGESGGNDPYMVSSPKTMAKIPVSVKPPPSLALNNMNYQTSSASTALSSLSNSHSGSRLKLNALSSLQMMTPIASSAPRTVFIDGPEQKQLQQQQNSLSPRYSNTVILPRPRSLTDFQGLNNANPNNNGSLRAQTQSSVQLKRPSSVLSLNDLLVGQRNTNESDSDFTTGGEDEEDGLKDPSNSSIDNLEQDYLQEQSRKKSKTSTPTTMLSRSTSGTNLHTLGYVMNQNHLHFSSSSPDFQKELNNRLLNVQQQQQEQHTLLQSQNTSNQSQNQNQNQMMASSSSLSTTPLLLSPRVNMINTAISTQQTPISQSDSQVQELETLPPIRSLPLPFPHMD

SEQ ID NO: 110 - DNA, 1515 bp, Saccharomyces cerevisiae
atgcaaagcccatatccaatgacacaagtgtctaacgttgatgatgggtcactattgaaggagagtaaaagcaagtccaaagtagctgcgaagtcagaggcgccaagaccacatgcttgtcctatctgtcatagagcttttcacagactggaacatcagacgagacacatgagaattcatacaggtgagaagcctcacgcgtgtgacttccccggatgtgtgaaaaggttcagtagaagcgatgaactgacgagacacagaagaattcatacaaactcccaccctcgaggtaaaagaggcagaaagaagaaggttgtgggctctccaataaatagtgctagttctagtgctaccagtataccagatttaaatacggcaaatttttcaccgccattaccacagcaacacctatcgcctttaattcctattgctattgctccgaaagaaaattcaagtcgatcttctacaagaaaaggtagaaaaaccaaattcgaaatcggcgaaagtggtgggaatgacccatatatggtttcttctcccaaaacgatggctaagattcccgtctcggtgaagcctccaccttctttagcactgaataatatgaactaccaaacttcatccgcttccactgctttgtcttcgttgagcaatagccatagtggcagtagactgaaactgaacgcgttatcgtccctacaaatgatgacgcccattgctagcagtgcgccaaggactgttttcatagacggtcctgaacagaaacaactacaacaacaacaaaattctctttcaccacgttattccaacactgttatattaccaaggccgcgatctttaacggattttcaaggattgaacaatgcaaatccaaacaacaatggaagtctcagagcacaaactcagagttccgtacagttgaagagaccaagttcagttttaagtttgaacgacttgttggttggccaaagaaataccaacgaatctgactctgattttactactggtggtgaggatgaagaagacggactaaaggacccgtctaactctagtatcgataaccttgagcaagactatttgcaagagcaatcaagaaagaaatctaagacttccacgcccacgacaatgctaagtagatccactagtggtacgaatttgcacactttggggtatgtaatgaaccaaaatcacttgcatttctcctcatcatctcctgatttccaaaaggagttgaacaacagattactgaacgttcaacaacagcagcaagagcaacataccctactgcaatcacaaaatacgtcaaaccaaagtcaaaatcaaaatcaaaatcaaatgatggcttccagtagttcgttaagtacaaccccgttattattgtcaccaagggtgaatatgattaatactgctatatccacccaacaaacccccatttctcagtcggattcacaagttcaagaactggaaacattaccacccataagaagtttaccgttgcccttcccacacatggactga

SEQ ID NO: 111 - protein, 382 aa, Saccharomyces cerevisiae
MPKKQTNFPVDNENRPFRCDTCHRGFHRLEHKKRHLRTHTGEKPHHCAFPGCGKSFSRSDELKRHMRTHTGQSQRRLKKASVQKQEFLTVSGIPTIASGVMIHQPIPQVLPANMAINVQAVNGGNIIHAPNAVHPMVIPIMAQPAPIHASAASFQPATSPMPISTYTPVPSQSFTSFQSSIGSIQSNSDVSSIFSNMNVRVNTPRSVPNSPNDGYLHQQHIPQQYQHQTASPSVAKQQKTFAHSLASALSTLQKRTPVSAPSTTIESPSSPSDSSHTSASSSAISLPFSNAPSQLAVAKELESVYLDSNRYTTKTRRERAKFEIPEEQEEDTNNSSSGSNEEEHESLDHESSKSRKKLSGVKLPPVRNLLKQIDVFNGPKRV

SEQ ID NO: 112 - DNA, 1149 bp, Saccharomyces cerevisiae
atgcctaaaaagcaaacgaatttcccagtagataacgaaaacagaccttttagatgtgatacctgtcaccgtggtttccatcggttagaacataaaaagagacacttgagaacacacactggggaaaaacctcatcattgcgcatttcctggttgtgggaaaagtttcagtagaagcgatgaactgaaaaggcacatgagaacgcatacagggcaatctcaaaggagattgaagaaagctagcgtacagaaacaggagtttttgacagtaagcggaattcctaccattgcatcgggcgtgatgatacaccaaccaataccgcaagtcctaccagcaaatatggccataaatgttcaggcagtaaatggaggtaacattatacacgctcccaatgcggtgcacccaatggtgataccaatcatggcccaaccagcccccattcatgcctccgctgcatctttccagcctgcaacttctcctatgccaatttctacatacactccagttccatcgcaatcattcacctctttccagagctctattggctccatacagtcaaatagtgatgtttcatctatcttctcgaacatgaatgttcgcgtaaacactccacgctctgtgccaaactctccgaatgatggatatttacaccagcaacatatcccacagcagtatcagcatcaaactgccagcccttctgttgccaagcagcagaaaacttttgcacattctcttgcatctgcattatctaccttacaaaaaagaacgcctgtaagtgccccttccaccactatagaatcaccatcctcaccaagtgattccagtcatacctctgcatccagcagcgctatctctttgcctttcagcaatgctccttctcagctcgccgtggccaaagaacttgagtccgtctatttagattccaatagatacaccaccaagactaggagggaaagagcaaaattcgaaattcctgaagaacaagaagaagataccaataacagcagcagtggtagtaatgaggaggagcacgagtcgctagatcatgaatctagcaaaagccgaaagaaattgtcaggcgtaaaattgccgcctgtacgtaacctactgaaacaaattgatgttttcaacggtcccaaaagagtttaa

SEQ ID NO: 113 - protein, 486 aa, Saccharomyces cerevisiae
MVHLGPKKPQARKGSMADVPKELMQQIENFEKIFTVPTETLQAVTKHFISELEKGLSKKGGNIPMIPGWVMDFPTGKESGDFLAIDLGGTNLRVVLVKLGGDRTFDTTQSKYRLPDAMRTTQNPDELWEFIADSLKAFIDEQFPQGISEPIPLGFTFSFPASQNKINEGILQRWTKGFDIPNIENHDVVPMLQKQITKRNIPIEVVALINDTTGTLVASYYTDPETKMGVIFGTGVNGAYYDVCSDIEKLQGKLSDDIPPSAPMAINCEYGSFDNEHVVLPRTKYDITIDEESPRPGQQTFEKMSSGYYLGEILRLALMDMYKQGFIFKNQDLSKFDKPFVMDTSYPARIEEDPFENLEDTDDLFQNEFGINTTVQERKLIRRLSELIGARAARLSVCGIAAICQKRGYKTGHIAADGSVYNRYPGFKEKAANALKDIYGWTQTSLDDYPIKIVPAEDGSGAGAAVIAALAQKRIAEGKSVGIIGA

SEQ ID NO: 114 - DNA, 2514 bp, Saccharomyces cerevisiae
acgccatagaagagcaatttccgtcctctactcatgtgattcgaactatgaaacaaagaaaaggcaagagtaaatagcgtgatacctattacgtattacgtatacatcctattattcttgaaaaaaagtgcggggctccagagctccacattggtgaccccagagtatactgctctttctaatgccttttccatcatgttactacgagttttctgaacctcctcgcacattggtacctagaaatggctatcatgccggacggcaccgggcaataaaccggacggcacaaaaaaatcgaagaaaagagatttctttttctcgcgggcagtttttccggtcgatcgacattcgtacggtactttctctgtttcagggacatcatgttgtaaaagaaaaagacagtttaggtaatcgttcttttctttctgaaaaattttccacgacgacgacgacgaccacgaaacacctttgattgcgagatccacgaaattacctcctgctgaggcgagcttgcaaatatcgtgtccaattccgtgatgtctctttgttgcaccttcgccactgtcttatctacaaaactataaaaaagagtaatcctaccccatatctaaaaaaaattccttaacttttataacttaacttcaaagtttcttaatattttttcgctttttctttgaaaaggttgtaggaatataattctccacacataataagtacgctaattaaataaaatggttcatttaggtccaaaaaaaccacaagccagaaagggttccatggccgatgtgccaaaggaattgatgcaacaaattgagaattttgaaaaaattttcactgttccaactgaaactttacaagccgttaccaagcacttcatttccgaattggaaaagggtttgtccaagaagggtggtaacattccaatgattccaggttgggttatggatttcccaactggtaaggaatccggtgatttcttggccattgatttgggtggtaccaacttgagagttgtcttagtcaagttgggcggtgaccgtacctttgacaccactcaatctaagtacagattaccagatgctatgagaactactcaaaatccagacgaattgtgggaatttattgccgactctttgaaagcttttattgatgagcaattcccacaaggtatctctgagccaattccattgggtttcaccttttctttcccagcttctcaaaacaaaatcaatgaaggtatcttgcaaagatggactaaaggttttgatattccaaacattgaaaaccacgatgttgttccaatgttgcaaaagcaaatcactaagaggaatatcccaattgaagttgttgctttgataaacgacactaccggtactttggttgcttcttactacactgacccagaaactaagatgggtgttatcttcggtactggtgtcaatggtgcttactacgatgtttgttccgatatcgaaaagctacaaggaaaactatctgatgacattccaccatctgctccaatggccatcaactgtgaatacggttccttcgataatgaacatgtcgttttgccaagaactaaatacgatatcaccattgatgaagaatctccaagaccaggccaacaaacctttgaaaaaatgtcttctggttactacttaggtgaaattttgcgtttggccttgatggacatgtacaaacaaggtttcatcttcaagaaccaagacttgtctaagttcgacaagcctttcgtcatggacacttcttacccagccagaatcgaggaagatccattcgagaacctagaagataccgatgacttgttccaaaatgagttcggtatcaacactactgttcaagaacgtaaattgatcagacgtttatctgaattgattggtgctagagctgctagattgtccgtttgtggtattgctgctatctgtcaaaagagaggttacaagaccggtcacatcgctgcagacggttccgtttacaacagatacccaggtttcaaagaaaaggctgccaatgctttgaaggacatttacggctggactcaaacctcactagacgactacccaatcaagattgttcctgctgaagatggttccggtgctggtgccgctgttattgctgctttggcccaaaaaagaattgctgaaggtaagtccgttggtatcatcggtgcttaaacttaatttgtaaattaagtttgaacaacaagaaggtgccctttttctacttatgtgaacatgttttctatgatctttttttttcttacttttacaactgtgatattgtataaactttgttagaaattcacgggatttattcgtgacgataaatatttatatagacaaagaatatgacgatttatgaaatctacatgattttagtttcttttaacaattgctcgtttttttctcttgcttaattttaaatttttttggtagtaaaagatgcttatataaggatttcgtatttattgttcaagtatttaaagactagatgtct

SEQ ID NO: 115 - protein, 1170 aa, Saccharomyces cerevisiae
MNELNTVSTNSSDSTKNGGTSNSPDDMDSAAAASHAIKKRTKASRACDQCRKKKIKCDYKDEKGVCSNCQRNGDRCSFDRVPLKRGPSKGYTRSTSHPRTNEIQDHNNSRSYNTFDNSNNTLNNNTGNSGDNGINSNTVPSTPSRSNSVLLPPLTQYIPQAGGIPPSFQNPAIQSTMPAGNIGQQQFWKVPYHEFQHQRKGSIDSLQSDISVRTLNPNEQLSYNTVQQSPITNKHTNDSGNANGSVTGSGSASGSGGYWSFIRTSGLLAPTDDHNGEQTRRSSSIPSLLRNTSNSLLLGGQPQLPPPQQQSQPQAHQQKLQQGQNLYSYSQFSQQQPYNPSISSFGQFAANGFHSRQGSVASEAMSPSAPAMFTSTSTNPVNVAQQTQRPQGQQVPQFSSELDGNKRRQSAPVSVTLSTDRLNGNENNNGEINNNNGSNNSGSSKDTSQHSQESVTTPAALEASSPGSTPQRSTKKRRKSYVSKKTKPKRDSSISITSKDSAHPMTTSSTIAYGQISDVDLIDTYYEFIHVGFPIIPLNKTTLTSDLLLVNTQPISNIHEVNSYVILWFRNSLELLVRVALKQKPGGKFFDNIVGVALSPSNDNNKAGFTTATARDDAEKTRRDSHNEVQDTLEVQSVFIAALNECFQKIVDIHPKFRENNDQISPKIKVIYLSTFILLNYILAFVGYDNSFVLGMSVTIFNEFKLYKLLLFPEPDINDVKPPVDEEVSTGNGNTKTSEFEIGSESAGHMNPSNSPNSMDENISHYSVLFKRLYVLLSVFDSLQSCAFGGPKLLNISIQGSTERFFSNDLGSKWCLEQSQLRLKSVLQSLKLGELMSELTRNRISMNGNRKPGFDITNSSSLLSEYVETQPLSVAQLFCKLLIGKHNFINCLLSLYDSEAGVYSDLTLDLSSKIADSLCSLISIILQVLTLILRLNPTNSIDFNYRPPNPPANNPTVQEGPSAMGSSPVAGNLSAAPPSEGNPDFYKKLLGLKQDTGTILSDLCRGIISPFAIAILHEVYNITELVKQMPTSLISIMMTATTTQNTQDTKKSQDLVMKLSNSMNEVVQITSVLTMIKPFKIFEHELNKPIMSLTGGLSSTTRNDVMWPKSGQGLRESSVMKTLLDERRTSGTQPTTAPVAAEEPRLENVALENFVSIGWKLLDDSELGWY

SEQ ID NO: 116 - DNA, 3513 bp, Saccharomyces cerevisiae
atgaacgagctgaacactgtttcgactaactccagtgactccaccaagaacggtggtacatccaatagtcccgacgatatggactccgcagcagcagcaagtcacgcaataaagaaaagaacaaaggcctcccgggcctgcgatcagtgtcgtaaaaagaagattaaatgtgactacaaagatgaaaagggggtctgctcaaactgccaaaggaatggagaccgttgtagttttgatagggttcctttgaaaaggggaccctcgaaaggctatacgaggagcaccagccatccaaggactaacgaaatacaagaccacaataactcaaggtcgtataatacgtttgataatagtaacaataccctgaataataatacgggcaatagcggcgacaacggtataaacagtaacacagttccaagtaccccttcgagatctaattcagttttattgcccccactgacacagtacattccccaggctggtggcattcctcctagtttccaaaatccagcgatacaatcaactatgcccgcgggtaatattggccaacagcagttttggaaagtgccctaccatgagtttcaacaccaaagaaaaggatctatcgattctttgcaaagtgatatatcggtaagaacattaaatcccaacgagcagttgtcttataacaccgttcaacagtctcccataacgaataaacatactaatgattctggaaatgcaaacggaagtgtcaccggctcaggcagtgcctctggtagtggtggttattggtcctttataagaacttctggtttactagctcctactgatgatcataatggggaacagacaagaagatcaagttccataccttctttgctacgaaatacttcaaattctcttttactaggtggccagcctcagcttcccccacctcagcaacaatcgcagccacaagcacaccaacaaaagttgcaacaaggacagaacctatactcgtattctcaattttcccagcagcaaccgtacaacccatcgatatcatcttttggccagttcgctgctaatggttttcattctagacaaggatcagtcgccagcgaggctatgtctcccagtgcacctgccatgtttactagcacatctacaaaccccgtaaatgttgcacagcaaacacaaagacctcaaggacagcaggtaccgcaattttcatctgagttggatggaaataaaaggcgacaatcagcccccgtatcagtaacattatccacggacaggctgaatggtaatgagaataataatggtgaaattaacaacaataatggcagcaataatagcggttcttctaaggatacatctcaacattcccaagaatctgtaactacaccagcggctttggaagcatccagccctggatcaacgccacagagaagtacaaaaaaacgcagaaaaagttacgtatctaagaagacaaaaccaaagagagattcatctatatctataacatcgaaagattctgctcacccaatgaccacttcatcaactatcgcgtatggacagatatccgatgtagatctaatagacacctactatgagttcatacatgtaggatttccgatcatacctttaaacaaaacgaccttgaccagtgacttattgttagttaacacacagccaatttccaatatacacgaagtcaattcatatgttattttgtggtttagaaattcattggaattgttagttcgtgttgctctgaaacaaaagccaggtggcaagtttttcgataatattgttggcgtggctttgtcgccaagtaatgacaacaacaaagctgggttcactacagccacggcaagggatgatgctgaaaaaacaagacgtgattcacataatgaagtacaggatactttggaagtgcaaagcgtttttattgccgccctcaatgaatgtttccaaaaaatcgtggatattcatcccaaattcagagaaaacaacgaccaaatttcgccgaagatcaaagtcatttatttatctacttttattcttttaaattacattttggcatttgttggatacgataactcatttgtacttggaatgtcggtgacaatttttaacgaatttaaattatacaaacttctattatttccggagccggatataaatgatgtgaagcctccagttgatgaagaggtcagcactggtaatgggaatacaaaaacgtccgaatttgaaattggatctgaaagtgctgggcatatgaatccatccaattcaccaaattccatggacgaaaacattagtcactattcagtgttgtttaaaagattatacgttttgctttcagtgtttgattctttacaaagctgtgcattcggtggtcccaagctattaaacatttccatccaaggttctacagaaagatttttttctaatgatttgggctcaaaatggtgcctggaacaaagccaattgagactgaaaagcgtcttgcaaagcttgaaattgggtgaattgatgagtgagcttaccaggaatagaatatcaatgaacggcaataggaagcctgggttcgatattacgaactcgtcttcactcttatcggaatatgtggaaactcaacctctatccgtagcacagttattttgcaagctattaattggcaaacacaatttcatcaattgcttattatcattatacgattcagaagcaggagtctattcagatttgacattggatttgagttcgaaaatagcagactctctgtgctcattgatatcaataattttgcaagtattgacgttgatattaagactgaatcctacgaacagtattgattttaattatagaccaccgaacccacccgctaataatccgacagtgcaagagggcccatctgctatgggctcgtctccagtcgctgggaaccttagcgctgcacctccatcggaggggaatccagatttttacaagaaattactaggcctgaaacaagacactggcactatcctttcagacctttgccgggggataatttccccctttgctattgctatcctgcacgaggtctacaacatcactgaactggtcaagcagatgcctacatcactcattagcattatgatgacggcaactacaacgcagaatactcaggacaccaagaagtcgcaggacctggtcatgaagctgtcaaactcgatgaatgaagtagttcaaatcaccagcgtgctgacaatgatcaagccattcaagatcttcgagcacgagcttaataagcccataatgtccctgacaggaggactttcgtccacgaccagaaacgacgtcatgtggccaaagtcgggccaaggcctccgcgagtcatcagtcatgaagacattgcttgatgaacgccgtacttctggtacacaaccgacaacggcgccagtagccgcagaggaacccaggcttgagaacgttgccctggaaaatttcgttagtatcggctggaagctgttggacgattccgagttaggctggtattga

SEQ ID NO: 117 - protein, 884 aa, Saccharomyces cerevisiae
MDPNSNSSSETLRQEKQGFLDKALQRVKGIALRRNNSNKDHTTDDTTGSIRTPTSLQRQNSDRQSNMTSVFTDDISTIDDNSILFSEPPQKQSMMMSICVGVFVAVGGFLFGYDTGLINSITSMNYVKSHVAPNHDSFTAQQMSILVSFLSLGTFFGALTAPFISDSYGRKPTIIFSTIFIFSIGNSLQVGAGGITLLIVGRVISGIGIGAISAVVPLYQAEATHKSLRGAIISTYQWAITWGLLVSSAVSQGTHARNDASSYRIPIGLQYVWSSFLAIGMFFLPESPRYYVLKDKLDEAAKSLSFLRGVPVHDSGLLEELVEIKATYDYEASFGSSNFIDCFISSKSRPKQTLRMFTGIALQAFQQFSGINFIFYYGVNFFNKTGVSNSYLVSFITYAVNVVFNVPGLFFVEFFGRRKVLVVGGVIMTIANFIVAIVGCSLKTVAAAKVMIAFICLFIAAFSATWGGVVWVISAELYPLGVRSKCTAICAAANWLVNFICALITPYIVDTGSHTSSLGAKIFFIWGSLNAMGVIVVYLTVYETKGLTLEEIDELYIKSSTGVVSPKFNKDIRERALKFQYDPLQRLEDGKNTFVAKRNNFDDETPRNDFRNTISGEIDHSPNQKEVHSIPERVDIPTSTEILESPNKSSGMTVPVSPSLQDVPIPQTTEPAEIRTKYVDLGNGLGLNTYNRGPPSLSSDSSEDYTEDEIGGPSSQGDQSNRSTMNDINDYMARLIHSTSTASNTTDKFSGNQSTLRYHTASSHSDTTEEDSNLMDLGNGLALNAYNRGPPSILMNSSDEEANGGETSDNLNTAQDLAGMKERMAQFAQSYIDKRGGLEPETQSNILSTSLSVMADTNEHNNEILHSSEENATNQPVNENNDLK

SEQ ID NO: 118 - DNA, 3642 bp, Saccharomyces cerevisiae
ttcagtctcaaaactttcagtacaaaaagtggcgtattggccttgtttttttcttattatgtcttatagtattatatttatatatttatgtacttatccttttatgtttaaacctaatcaagatcacaattagaactagcttaacattacttctcaaaaccaaccaatacctcttatatcttttttacagcctttcccttatgtttttaccatgtacacctcgagcggcaaatctccggggaaattttaaacttgccgcatcgcacattctaaagaacaaaaggaggaggaactgtcaattattctataatctggggaaattcagtcatactgagaaaaactagacaatagtcctatcctcggcaaattgcattgatagtacttacacatcgagagatcataggacagataagaagcattttattgaagaaaaacagagagagtcactataagttgacctcactatagaaattaaaacagaaaagttttactgaggacctttttaaacagaaggatatgcctttgttggcatagaaagaagaatttataaatggatcctaatagtaacagttctagcgaaacattacgccaagagaaacagggtttcctagacaaagctcttcagagggtgaagggcatagcactgcgacgaaacaatagtaacaaagatcatacaacagatgatacgacaggtagcatacgaacccctacgagcttgcagcggcaaaattctgacaggcaatctaatatgacatccgtgtttacggatgacatttctaccatagacgacaactcaattttattttcagagcctcctcagaaacaatctatgatgatgtctatatgcgtaggtgtttttgttgcagttggcggatttttatttggttatgatacaggtctgatcaacagtattacatctatgaactatgtgaagtcacacgtagcacctaatcacgattcatttaccgcccaacaaatgtccattttggtgtcatttttgtcattgggaactttttttggggctttaactgcaccatttatatctgattcgtatggcaggaagcctactatcattttcagtacaattttcatcttctctatcggaaattctttacaggtaggtgctggaggaatcacattattgattgtgggaagggtcatttcaggtatcggtataggcgcaatttcagcggttgttccattataccaagcagaagctacacataaatcattaagaggtgctattatttctacttaccaatgggccattacctggggcttgctcgtgtcaagtgcagtgtcgcaagggacacacgcaagaaacgacgcatcttcgtatcggattcccatagggttgcaatatgtctggtcgtcatttctcgctatcgggatgttctttctccctgagagtccacgctattacgttttgaaagacaagctagatgaagcagctaaatctttatcgtttttaagaggtgtaccagtccatgattctgggttactggaagaactagttgaaataaaggcaacatatgattacgaggcatcttttggttcttcgaacttcattgattgttttatttcaagtaaaagtagaccaaagcaaactctaaggatgtttacgggaattgcccttcaagcatttcaacaattttcaggtatcaactttatattttactacggtgtcaatttcttcaataagacaggagtcagtaatagttatctggtttcatttataacctatgctgttaatgttgtctttaatgttcctggtttgttttttgtggaattttttggtagacgtaaggtgctggttgttgggggtgttatcatgactatagccaactttattgtggccattgttgggtgttccttaaagactgtagcggccgcaaaagttatgatagcatttatatgtctattcatagctgccttttctgctacatggggtggtgttgtttgggttatttcagcagaactgtacccattgggtgtgagatctaaatgtacggctatatgcgctgctgctaactggcttgtaaactttatttgtgctttaattaccccttatattgtagatactgggtcgcatacatcatcattaggtgcaaaaatattcttcatttggggctccttaaatgcgatgggggtgatagttgtttacttgaccgtttatgaaacgaagggtttgacattagaagagattgatgaattatatattaagtcatccactggtgtcgtgtcaccaaaatttaataaagatattagggaacgcgcacttaaattccaatacgatcctttgcaaagattagaagacggaaagaacacttttgttgctaaaagaaataattttgacgatgaaacaccaagaaatgattttcgaaatacgatatcgggcgaaatagatcatagtcccaatcaaaaagaagttcattctatcccagaacgtgttgatattcctactagtacagaaattcttgaaagcccgaacaaaagtagtggtatgacagtccctgtgtcaccttctctgcaagacgttccaatcccgcaaacaacagagcctgctgaaattcgaaccaaatatgtggacctaggaaatgggcttggtcttaatacgtataatagagggcctccctcactctcaagcgactcaagcgaagattacacagaagatgaaataggcgggccctcatctcaaggcgaccaaagtaatagaagtactatgaatgatattaatgattatatggcacgtctcattcacagtacttctactgcaagtaacacgacagataagttctccggtaaccaaagtacccttcgttaccacacggcttcctcacattcggatacaactgaagaggacagcaatttgatggacctgggaaacgggcttgccttgaatgcttataacagaggtccaccttcaattttaatgaattccagtgatgaagaggcaaatggtggtgagacgtctgataatttgaacacagctcaagacttggctggtatgaaggaacgaatggcgcagtttgcgcagagctatattgacaagagaggcggtctggaacctgaaactcaatctaatattttgagcacttctctctccgtgatggctgacactaatgaacataataatgaaatcctccactcaagcgaagaaaacgccactaatcaacctgtaaatgaaaataatgatttgaaataattaatttaatgttattcgatgtattaattaagcggacgtgcattataattttaatcatgtgaaagaaataattgtaacttgagatactactcaacttttatagatacacaatgtttatcttgacacacattcaattacattacttgatttaatgcctttccaaaattatgatcttttcttctataacacttttggatacttagccgccgacggataccatcttcggtcaacgtcggaagtcattataaacgaaaaggtttcccaatagaaaagtcctgcaggagccacgtataacactggcttgaattatcaacaactctcgaaggcgctggaagagaatttttacgcaagttagtattcgcataacattagttggcaaattacacaattttttgatacaatatatatacatatattttccccattgtttttcttag

SEQ ID NO: 119 - protein, 763 aa, Saccharomyces cerevisiae
MNDSQNCLRQREENSHLNPGNDFGHHQGAECTINHNNMPHRNAYTESTNDTEAKSIVMCDDPNAYQISYTNNEPAGDGAIETTSILLSQPLPLRSNVMSVLVGIFVAVGGFLFGYDTGLINSITDMPYVKTYIAPNHSYFTTSQIAILVSFLSLGTFFGALIAPYISDSYGRKPTIMFSTAVIFSIGNSLQVASGGLVLLIVGRVISGIGIGIISAVVPLYQAEAAQKNLRGAIISSYQWAITIGLLVSSAVSQGTHSKNGPSSYRIPIGLQYVWSSILAVGMIFLPESPRYYVLKDELNKAAKSLSFLRGLPIEDPRLLEELVEIKATYDYEASFGPSTLLDCFKTSENRPKQILRIFTGIAIQAFQQASGINFIFYYGVNFFNNTGVDNSYLVSFISYAVNVAFSIPGMYLVDRIGRRPVLLAGGVIMAIANLVIAIVGVSEGKTVVASKIMIAFICLFIAAFSATWGGVVWVVSAELYPLGVRSKCTAICAAANWLVNFTCALITPYIVDVGSHTSSMGPKIFFIWGGLNVVAVIVVYFAVYETRGLTLEEIDELFRKAPNSVISSKWNKKIRKRCLAFPISQQIEMKTNIKNAGKLDNNNSPIVQDDSHNIIDVDGFLENQIQSNDHMIAADKGSGSLVNIIDTAPLTSTEFKPVEHPPVNYVDLGNGLGLNTYNRGPPSIISDSTDEFYEENDSSYYNNNTERNGANSVNTYMAQLINSSSTTSNDTSFSPSHNSNARTSSNWTSDLASKHSQYTSPQ

SEQ ID NO: 120 - DNA, 4409 bp, Saccharomyces cerevisiae
tagctgaaaaatcgcggtactgaagcttttttcatggcgcccttgaaactttctccttccgcctgcgcattatataaaatacgttacaataggaaaagatgacagttacttaaagtaaagcttcacagcttcagacaaaaaaagtatgaaacttgtgaagatgtttttatgctgatccggcagacggccattccattatttagttctgattttagtggaaaaactttcgaaacttaaaataataatagcccattcttggactgaggtacattttcttcttattggatttcgtttattagctgtttaacatatttctgtagggtttttttttttttttttgtacagattagaaaccatacagtgtaaaccattatataggtcaattaatatatttatagatcatcctgtcaatttttttttatttttttttgcaaagctccctttttcctgaaaccaacaacaaaatataaaaaaaaaatgataagcaggattttttcttttaataattccttaaaattaactaacaagctgaagcccttacaacaaagtaagtcaaacccaattcacaaaaaaaaaatctgttttatttcagatatgcagggtatatacatggcacagataaccttttaatgaaaagtagcaattgtgatactagcgcctttttccttgcaagaaaagggttccctgttcctgcatcgtccatcggcatagagatgtcgccgctaccctatccaattctaccgcatgcctaacaaaatgatttccgattttttcaatctaactccgtcatttcttatctgagttttcctccccgagataaattgaacaaagaatttaatcggctcatatgtgaaaaagtgtgatacttaccgcaatgggcaaaaattattaaaaaaaatctaattccgcgcttggctattatctcattaccgactcaacggtgactacctgccgtacacgcttcccctttgcttcttcctccacctcgaaagtagaacatatacatggaacagacataagctcttcagcgtatctatttcataagtggagagcatcgaacaataaacctttgcctaatttcatataacatccagtattcattttttttagttgacgctaaggcattcgcttgtgaaattaaagagcagatcaggaatagtatcaatagtctaaaccatcaagttgcacagaaaccactatatatatatggaaatatctcgaatattgcttgtatgaacgatagccaaaactgcctacgacagagggaagaaaatagtcatctgaatcctggaaatgacttcggccaccaccagggtgcagaatgtacgataaatcataacaacatgccacaccgcaatgcatacacagaatctacgaatgacacggaagcaaagtccatagtgatgtgcgacgatcctaacgcataccaaatttcctacacaaataatgagccggcgggagatggagctatagaaaccacgtccattctactatcgcaaccgctgccgctgcgatcgaatgtgatgtctgtcttggtaggcatatttgttgccgtggggggcttcttgtttgggtatgacactggacttataaacagtatcacggatatgccgtatgttaaaacctacattgctccgaaccattcatatttcaccactagccaaatagccatactcgtatcattcctctccctaggaacatttttcggtgcgttaatcgctccctatatttcagattcatatggtaggaagccaacaattatgtttagtaccgctgttatcttttccatcggaaactcattacaggtggcatccggtggcttggtgctattaatcgtcggaagagtgatctcaggtatcgggatcgggataatctctgctgtggttcctctttatcaagctgaagctgcgcagaagaaccttagaggtgccatcatttccagttatcagtgggctatcactattgggttactcgtgtccagtgcagtatcgcaaggaactcattccaaaaatggcccgtcttcatatagaataccaattggtttgcagtacgtttggtcaagtattttagctgtgggcatgatattccttccagagagtccaagatattacgtcttgaaggatgaactcaataaagctgcaaaatcgttatcctttttaagaggcctcccgatcgaagatccaagactcttagaggagcttgttgaaataaaagccacttacgattatgaagcatcgttcggcccgtcaacacttttagattgtttcaaaacaagtgaaaatagacccaaacagattttacgaatatttactggtatcgccatacaagcttttcaacaggcatctggtatcaattttatattctactatggagttaattttttcaacaacacaggggtggacaactcttacttggtttcttttatcagctatgccgtcaacgtcgccttcagtataccgggtatgtatttagtggatcgaattggtagaagaccagtccttcttgctggaggtgtcataatggcaatagcaaatttagtcattgccatcgttggtgtttccgagggaaaaactgttgttgctagtaaaattatgattgcttttatatgccttttcattgctgcattttcggcgacatggggtggtgtcgtgtgggtggtatctgctgaactgtacccacttggtgtcagatcgaaatgtaccgccatatgcgctgccgcaaattggctagttaatttcacctgtgccctgattacaccttacattgttgatgtcggatcacacacttcttcaatggggcccaaaatattcttcatttggggcggcttaaatgtcgtggccgttatcgttgtttatttcgctgtttatgaaacgaggggattgactttggaagagattgacgagttatttagaaaggccccaaatagcgtcatttctagcaaatggaacaaaaaaataaggaaaaggtgcttagcctttcccatttcacaacaaatagagatgaaaactaatatcaagaacgctggaaagttggacaacaacaacagtccaattgtacaggatgacagccacaacataatcgatgtggatggattcttggagaaccaaatacagtccaatgatcatatgattgcggcggataaaggaagtggctcgttagtaaacatcatcgatactgcccccctaacatctacagagtttaaacccgtggaacatccgccagtaaattacgtcgacttggggaatggtttgggtctgaatacatacaatagaggtcctccttctatcatttctgactctactgatgagttctatgaggaaaatgactcttcttattacaataacaacactgaacgaaatggagctaacagcgtcaatacatatatggctcaactaatcaatagctcatctactacaagcaacgacacatcgttctctccatcacacaatagcaatgcaagaacgtcctctaattggacgagtgacctcgctagtaagcacagccaatacacttccccccaataaaaaccaatagcatcttacgatcgttcgaggtcttataaaccgttttatataaattattcttatacacgcactcttgagtttcttttaacattccaacatgatagacatagaaaagaattatagataacacataacattactcacaagtagcccatgagtttgatttttcctcgttaattcggtgtcaagtggaatacaaaatgggtcaactgatcataactattacccggataatctacatcatgtggtacgttaacgatgtatggtttcctaaatcaccgggttccagatgcgggttgttgttgttcgatcttgcacctccacgtactccttttgaatagtacacatataccttacaggagatcggacgtgtgcgattattgttacctcgtcacctgttatcggttgaactgttttagctctttccattccctttgttaatagtagtttaattcttcggaaactttctacgcagactcaagttgcaataggctaaagataaggcagacactttgtatgtaacgagtttcattaggagggatagacgcacgacactatctggtactacgtgttatatcatacccagaaggaaggactctctccactgaacggtgggatgagttcctaaaggcgcccctttatttgatcaggaagccgtattgattatctaatagggcctagttatcctaattgtggggagtcgagcagtacggctctgatgtttttcgaacgaagataaggagttgacatacaaagtcaacagaagttcttcttgttagcgtctctgtgctcaatatctctctttttttctttaagtagtaattactaacatcagccaaccaatagagataaaaaaaaaaggaattaagatttcatagagaaaag

SEQ ID NO: 121 - protein, 444 aa, Saccharomyces cerevisiae
MFVSPPPATARNQVLGKRKSKRHDENPKNVQPNADTEMTNSVPSIGFNSNLPHNNQEINTPNHYNLSSNSGNVRSNNNFVTTPPEYADRARIEIIKRLLPTAGTKPMEVNSNTAENANIQHINTPDSQSFVSDHSSSYESSIFSQPSTALTDITTGSSLIDTKTPKFVTEVTLEDALPKTFYDMYSPEVLMSDPANILYNGRPKFTKRELLDWDLNDIRSLLIVEQLRPEWGSQLPTVVTSGINLPQFRLQLLPLSSSDEFIIATLVNSDLYIEANLDRNFKLTSAKYTVASARKRHEEMTGSKEPIMRLSKPEWRNIIENYLLNVAVEAQCRYDFKQKRSEYKRWKLLNSNLKRPDMPPPSLIPHGFKIHDCTNSGSLLKKALMKNLQLKNYKNDAKTLGAGTQKNVVNKVSLTSEERAAIWFQCQTQVYQRLGLDWKPDGMS

SEQ ID NO: 122 - DNA, 3461 bp, Saccharomyces cerevisiae
gatccaacatgttatcggcttcatccaaaacaaaaattttaattttctgtagctgcatcaattttctacgcattaggtcaagaacagtgcccggcgtaccaacaatcacttgagcattaatttgcttgtttttctcaaaagaatcgggaacaattaactgactggttatttttgtgaacttacccatttcctgaacgacttctagtgtttgtctggccagttctctggagggggctaagcaaattgcctgtggagatgcgtcttctgggtttactcttgttagcatcgttaaagaaaaggcggcagttttacctgtacctgattgagactgagcaatcatgttcctaggcggattatgtaataataatggcagcgccctttcttgaattttggatggtttttgaaatttcatagcatatatcccctttagtagttctggtgctaatcctaattcatcaaaagatttagcactgtacaatggagaatttgggtcagcctggatatcagcaagtttgaccttaacttcatattctgagctgattaaattactatcctcctgttttgtttttttttcctcaacttttggaactaatttttctgcaggcttgatcgaatcagcagtcttttctggttgggacttaacagtctcttttgttgaaacttcacttgtatcctctttctcattatcaatctttaaagaagctagtaaatcggccggatctctctttgtatcactcattccgatctaaggtggtaagtatttttatagatgttcttggttgctgatcgagtattttatggtgtataaaggtcaactggttttaaaggtaatgcaaattttgcaatgctttgcttgattgaaaaatttgcatacgggtaataccgcgttgataataatgtaacaatcaaataatcaagacaacagcagagttattctttaaatacgatatatatgggagtatcatcatatttaaatgttgatttttttgggttttttttttgggcaattttagagcagtaggcttaaaatatattaaaattattaaaggtattacttaatcttaaaggtcgtcgaaatctataatagtacgtgtatcaaacacttttgtaattaatattaatgtcgttaagtggttaaatagtggggtatttcgtttttgcgttgttgtaaaaatttactaggacattccatcaggcttccaatctaaccccaacctttgataaacctgtgtttggcattgaaaccagatggcagccctctcctctgaagttagagaaaccttattaacgacatttttctgtgtaccagcacctaatgtcttagcatcatttttataattttttagttgcaaatttttcattaaagccttttttaaaagactaccagagttagtgcagtcatgtattttaaaaccatgcggtatgaggcttggaggcggcatgtcaggccttttcaaatttgaatttagtaatttccatctcttgtattcggagcgcttttgtttaaagtcatatctgcattgggcctcgacggcaacatttaataaatagttctcaattatatttctccattcaggctttgatagacgcataatgggttcctttgacccagtcatttcttcatgtctttttcttgctgatgcaactgtatattttgcgcttgtcaacttaaaattgcggtctagatttgcttctatgtataagtctgagttaaccaatgtcgctattataaactcatcactggaacttaggggaagtaattgtagtctgaattgcggtaagtttataccggaggtcactaccgtcggtaactgggaaccccattctggccttaattgttccacaattaacaaggatcgtatatcgtttagatcccagtccagcaattcgcgctttgtaaacttaggacgtccgttataaagtatatttgctggatcagacatcagaacttcgggagaatacatatcatagaatgttttgggtaaagcgtcttcaagtgttacttctgtgacgaacttaggtgtttttgtatcaattaacgagctgcctgtggtgatgtccgtaagagcagtagatggctgtgaaaatatactcgattcgtatgaagatgaatggtctgaaacaaaactttgactgtccggggtatttatgtgttggatatttgcattttctgcagtattactgttcacttccataggtttagttcctgcagtaggcaataacctttttatgatttctattcttgccctgtctgcatattctggtggtgtagtaacaaaattgttgttgctcctaacatttcctgaattggaactcaaattatagtgatttggtgtgtttatttcttggttattatgtggaagattgctgttgaatccaatagaaggaacgctatttgtcatttctgtgtcagcgttgggttgaacattctttggattttcgtcatgtcttttcgattttcttttccctaatacttggttcctcgctgttgctggaggtggtgaaacaaacatctcgttttatttgtctgttaagtagtgcaaaacctcctacaatcgcgatggtaacgaaaatgataggtaaatgagagcttctaatatattaaactggtttcctacggtacgatatttcttgaagcctttcttctcctctatttagttcgaaaacgtccctctctcgttaactcaaaagaaaatttactaaactataactctgtcttttaataactcctggaatttttccgttatggaactaagagcagccttcgctaaaagattttccgtgttttcaaaaggaagggaaaaaattggacaaaaacccgcgtacgaaaattttcctgcttagctcagtcggatttattgaaaactttatttcatttttccacaacatcccacattacccgattgtttgttgcaagattttttgaagaggacgcttgcatattggccaaggaggaagtgtaagatgtgctttcgtgacttgagcgaaggggttggcgttgtatagcatgaacttcccaatatgttgcattcatccctggatgataacagaccaaagaccaaatttgattttaagtttaggaacttagaaaaaaaaggtagtgccgtattcgaaactttcgccgtggactgcctctcttttcaaaaaagaagaacagaccatgctttttctcctggatctggaagaaaaaatacacgaagcgtataaatcaaaatagagttcggtctattggcttacaaggatttcgctattttacaagaggacgtatattcatatattcatgcttcagcatgattttctcttaacttaatatgttccattttttgttataaaatattactgttcgtcgtttgtaagagcagacactattatcttaaaagagcttttttttaattgtatgaagattttataaatttgcgaaaacctaaatttaccataaaataaaatgcgcacgagtagtt

SEQ ID NO: 123 - protein, 1151 aa, Saccharomyces cerevisiae
MDQDNNNHNDSNRLHPPDIHPNLGPQLWLNSSGDFDDNNNNNNNNNNNNSTRPQMPSRTRETATSERNASEVRDATLNNIFRFDSIQRETLLPTNNGQPLNQNFSLTFQPQQQTNALNGIDINTVNTNLMNGVNVQIDQLNRLLPNLPEEERKQIHEFKLIVGKKIQEFLVVIEKRRKKILNEIELDNLKLKELRIDNSPQAISYLHKLQRMRLRALETENMEIRNLRLKILTIIEEYKKSLYAYCHSKLRGQQVENPTDNFIIWINSIDTTESSDLKEGLQDLSRYSRQFINNVLSNPSNQNICTSVTRRSPVFALNMLPSEILHLILDKLNQKYDIVKFLTVSKLWAEIIVKILYYRPHINKKSQLDLFLRTMKLTSEETVFNYRLMIKRLNFSFVGDYMHDTELNYFVGCKNLERLTLVFCKHITSVPISAVLRGCKFLQSVDITGIRDVSDDVFDTLATYCPRVQGFYVPQARNVTFDSLRNFIVHSPMLKRIKITANNNMNDELVELLANKCPLLVEVDITLSPNVTDSSLLKLLTRLVQLREFRITHNTNITDNLFQELSKVVDDMPSLRLIDLSGCENITDKTIESIVNLAPKLRNVFLGKCSRITDASLFQLSKLGKNLQTVHFGHCFNITDNGVRALFHSCTRIQYVDFACCTNLTNRTLYELADLPKLKRIGLVKCTQMTDEGLLNMVSLRGRNDTLERVHLSYCSNLTIYPIYELLMSCPRLSHLSLTAVPSFLRPDITMYCRPAPSDFSENQRQIFCVFSGKGVHKLRHYLVNLTSPAFGPHVDVNDVLTKYIRSKNLIFNGETLEDALRRIITDLNQDSAAIIAATGLNQINGLNNDFLFQNINFERIDEVFSWYLNTFDGIRMSSEEVNSLLLQVNKTFCEDPFSDVDDDQDYVVAPGVNREINSEMCHIVRKFHELNDHIDDFEVNVASLVRVQFQFTGFLLHEMTQTYMQMIELNRQICLVQKTVQESGNIDYQKGLLIWRLLFIDKFIMVVQKYKLSTVVLRLYLKDNITLLTRQRELLIAHQRSAWNNNNDNDANRNANNIVNIVSDAGANDTSNNETNNGNDDNETENPNFWRQFGNRMQISPDQMRNLQMGLRNQNMVRNNNNNTIDESMPDTAIDSQMDEASGTPDEDML

SEQ ID NO: 124 - DNA, 4478 bp, Saccharomyces cerevisiae
ctaactaatttgataaacaggctaaaggtttgtattttttgtagttttgaaactgtgtatagaatgtttcgccgcatcgcagatatctgcagggaactgttgacatagcatcttctgtggacgtgacaacgttacgtatattcgttgataccgcaagtctatagcgtatacatgctaaggcaaaaagtttcaaagtgaatgcattatgtatttatatgtaaataagtaagaaaagtgggattttgaaaataaaggtgtagtaggacagtaagtattcaatgaaatacaattataacatatcttcatcgggcgttcctgatgcttcatccatttgagaatcaatggcagtgtcaggcattgattcgtcaattgtgttgttgttattgttcctaaccatgttctgattacgaagtcccatttggagattcctcatctggtcaggtgatatttgcattctattgccaaactgacgccagaaatttggattttctgtttcattgtcatcattaccattgttagtttcattgttacttgtatcgtttgccccagcatccgatacaatattcactatgttgttggcgttccggttggcgtcattgtcattattgttattccatgctgatctttggtgggctattaatagttctctttgtctggttaacaatgttatgttatcttttaaatatagtctcaaaacaacggtggagagcttgtacttctgaaccaccataatgaatttgtcaatgaataaaagtcgccatattaaaagccctttttggtaatctatgttgcccgattcctgaaccgttttttgtactaaacaaatttgtctgtttaattcaatcatttgcatataggtttgagtcatttcatgaagtaaaaaaccagtaaactgaaactgaactcttaccaaactagcaacattcacctcgaaatcatcaatatgatcatttaactcatggaattttctaacaatatgacacatttcactgttaatttcccggtttacaccaggtgctacgacataatcttgatcatcgtccacatcactaaatggatcttcacaaaacgtcttgtttacttgcaataatagtgagttaacttcctccgagctcatcctaatgccatcaaaagtattgagataccaactgaatacttcatctattcgttcaaaattgatattctggaaaagaaaatcgttatttagaccgttgatttgatttaatcctgtagcagctataattgcagcggaatcttgatttaaatcagttatgattctcctaagagcatcttcaagtgtttcaccgttaaatatcaaattcttggatctaatatattttgtcaaaacatcatttacatcgacatgtggtccaaaagcgggcgacgttaaatttactaaataatggcgaagtttatgaacacctttccctgaaaatacgcagaatatttgacgttgattttcactaaagtctgagggtgcaggcctgcaatacatcgttatatcggggcgtaaaaatgacggaacagcagtcaaagacaaatgtgagagccttgggcaagacattagaagctcatatatcggatatattgttaaattagaacagtaagataaatgtaccctttctaaagtatcatttcggcctcgcaaggaaaccatattcaacaaaccctcgtcagtcatttgcgtacatttgacaaggccaattctctttaattttggtaagtctgctagttcataaagagttctattggttaaattcgtacagcacgcaaagtccacatactgtattcttgtacatgaatgaaagagtgctcttaccccgttatcagttatattgaaacagtgcccaaaatgcactgtttgcaagtttttgcccagcttcgataattggaacaacgatgcatctgtaattcggctacacttgcctagaaaaacattacgtaatttaggggctaaattgactatactttctatagttttatctgtaatattttcacatccagaaagatcaatcaatcttaaagagggcatatcgtcaactactttagaaagctcctggaaaagattatccgtaatattcgtattatgagttattctgaattccctcagctgaactaacctagtgaggagttttaacaaactagaatcagtgacatttggacttaatgttatatcgacctctacaagcaaagggcatttgttggctaatagttctactaattcgtcattcatgttattgtttgctgtgatttttattcttttcaacatcggggaatggactatgaaattccgcagtgaatcgaatgttacattccttgcctgaggaacataaaagccctgtactctgggacaatatgtcgctaaggtatcaaatacgtcatcggaaacgtctcttattccagtgatatccacactttggagaaatttacatcctctcaaaacagccgatattggaacactggttatatgcttgcaaaatactaaagttagtcgctccaaattcttacatccgacaaaatagttaagctctgtatcgtgcatgtagtcaccaacaaatgaaaaatttaatcttttgatcattaaacgatagttgaatacagtttcttcagaagttaacttcatagtccttaaaaacaagtctaattgactctttttgttgatgtgcggtctgtaataaagtatcttcacaattatttcagcccagagtttggaaacggtaaggaattttacaatatcatatttttggttaagtttatctaatattaagtgtaatatttccgagggtagcatgtttagggcaaacacaggtgatcttcgggtgacactcgtacatatgttttgatttgatggattcgaaagcacattatttatgaactgccttgaatatctcgaaagatcttgtagcccttctttcaagtcagatgattcagtagtatctatggagtttatccaaatgatgaaattatctgttggattttccacttgttgacctcttagcttggaatggcagtatgcatataatgactttttgtactcttctataattgttaatatttttagccttaaatttctaatttccatgttttctgtctctagcgccctaagcctcattctttgtaatttatgcaaataactaattgcttgtggggagttatcaatacgtagctcctttagtttaaggttgtctagctcaatttcgttcagtattttttttctacgtttctctataacaaccagaaactcttggatttttttgcccactattagcttgaattcgtggatttgcttccgttcttcctctggtaggttcggtaacaatcgattaagttgatctatttgaacattgacaccattcataaggtttgtgttcacagtgtttatgtcaatcccgttcagcgcatttgtttgctgttgtggttgaaatgtcagcgaaaagttttgatttagcggttgtccgttgttggttggcaaaagcgtttcccgttgaatactatcgaacctaaagatattatttagcgttgcatccctaacctcacttgcatttctttccgaagttgccgtttctctagttcgtgatggcatttgtggtcttgtgctattattattgttgttgttgttgttgttgttgttgttgtcgtcaaaatcaccgctactattcagccacaattgagggcccaaatttggatgtatatcaggtgggtgcagcctattgctgtcattgtggttgttgttatcctgatccattatagaccttcttagtataaaggaaaccgcaaaactgtttagcctcactaccaatgataattattgtgccgaaatcaatgagaaatttcaagatttcacgcaggtgtaagcttaaatgcaatgccttaatttttgggcttccctgctagttggacacaagtacgattttgatattcaaaaaccgggcttctaagagaacgattaaatgaaaacgaattattgtgtaaaatcgaaaaactggtgaagtatggacaaaagaaagtaacacacaggcacagttaaatttggtgttatgtattttgccacgccttttttgataatcatatcactaaatttgttaaaaggcaaattttaaaacaagttcctttaccaaggaaggtccataggcgggtaacctcagtagtaatgaaagcctagtaatgatgactataaatgttcattaacacatctgggtaataaatgatgatatttttaaaaactgtataaaactttatggatttatttaatcatgattaggtgtagaaaaaaaatttggcgatatgatggcttgaaaaagacacgtcttcccagtaatgaaaatgcccaaattcttcattagctcgctcatattctattaggatttgaaccataaaaccgttgggggtaaatgagatagttttgaatggatgcaggtatgagaagaaaacggcgtggtctcccaatgatgacggaaataaaagaaaacatggggacg

SEQ ID NO: 125 - protein, 538 aa, Saccharomyces cerevisiae
MSMPIASTTLAVNNLTNINGNANFNVQANKQLHHQAVDSPARSSMTATTAANSNSNSSRDDSTIVGLHYKIGKKIGEGSFGVLFEGTNMINGVPVAIKFEPRKTEAPQLRDEYKTYKILNGTPNIPYAYYFGQEGLHNILVIDLLGPSLEDLFDWCGRKFSVKTVVQVAVQMITLIEDLHAHDLIYRDIKPDNFLIGRPGQPDANNIHLIDFGMAKQYRDPKTKQHIPYREKKSLSGTARYMSINTHLGREQSRRDDMEALGHVFFYFLRGHLPWQGLKAPNNKQKYEKIGEKKRSTNVYDLAQGLPVQFGRYLEIVRSLSFEECPDYEGYRKLLLSVLDDLGETADGQYDWMKLNDGRGWDLNINKKPNLHGYGHPNPPNEKSRKHRNKQLQMQQLQMQQLQQQQQQQQYAQKTEADMRNSQYKPKLDPTSYEAYQHQTQQKYLQEQQKRQQQQKLQEQQLQEQQLQQQQQQQQQLRATGQPPSQPQAQTQSQQFGARYQPQQQPSAALRTPEQHPNDDNSSLAASHKGFFQKLGCC

SEQ ID NO: 126 - DNA, 1795 bp, Saccharomyces cerevisiae
gtatacatgggtctttgatttctgcttgcttcttacaaacaacaaacgcaaaccgttcattgagtgctctgtgactggttttcatgtggatgccatagtagagaaaagacacatacaaaaatttcgcgcattcgctggcccttttcctgctctcctcttccccatgtccatgcccatagcaagtaccactctagcagttaacaacctcaccaatataaacggaaacgcaaattttaacgtacaagcaaacaaacaactccaccaccaggctgtcgactcgcccgcaagatcttcgatgaccgccacgaccgccgccaactccaacagcaactcttccagagatgactctactattgtcggcctacattacaagatcggcaaaaaaataggggaaggttcctttggtgtgctatttgaaggtactaatatgatcaatggcgtacccgtcgcgatcaaattcgagcccagaaaaacggaggcccctcaattaagagatgaatataaaacatataaaattctgaatggcactcccaatatcccctacgcgtactacttcggccaagaaggtttgcacaatatcttggtcattgatcttttgggtccctctttggaagatttatttgattggtgtggaagaaaattttctgtcaaaacggttgtgcaagttgctgtccaaatgattactttgattgaagacttgcacgcacatgacttgatataccgtgatatcaaaccagacaatttcttgattggaaggcccggccaacctgacgcaaacaacatccatttgatcgacttcggtatggccaaacagtatcgtgatccgaaaactaaacagcacatcccatatagagagaaaaaatcactcagcggcactgccagatatatgtccattaatactcaccttggaagagagcagtccagaagagatgatatggaggccttgggtcacgttttcttttatttcttgagaggccacttaccctggcagggtttaaaagctccaaacaataagcaaaaatacgaaaagattggtgaaaagaaaagatctactaacgtttacgatctagctcaaggcttacctgtgcaatttggcaggtatctagaaatcgtcagaagtctttcctttgaagagtgtcccgattatgaaggctatagaaaactattactatctgtactggatgatttaggtgaaaccgcggacggccaatatgattggatgaaactgaacgatggccgtggttgggatcttaacataaacaagaagccaaatctccacggatacggccatccaaatccaccaaacgaaaaatcgagaaaacatagaaacaaacagctccaaatgcaacagctccaaatgcaacagctccaacaacagcaacagcaacagcaatatgctcaaaaaactgaggcagatatgcgcaattctcaatataaaccaaagttagaccctacttcttatgaagcttaccagcatcaaacccagcagaaatacctgcaagaacaacaaaagagacagcagcaacaaaaacttcaggagcaacaacttcaagagcaacaattgcaacagcagcaacagcaacagcaacagctacgtgcaacaggccaacctccatctcagcctcaagcgcaaactcaatctcagcagtttggcgctcgttatcaaccacaacaacaaccttctgctgctttaagaactcctgaacagcacccaaatgacgataattcaagtctagctgcttctcataagggctttttccaaaaattaggttgttgctaaatatagaaatgacat

SEQ ID NO: 127 - protein, 485 aa, Saccharomyces cerevisiae
MVHLGPKKPQARKGSMADVPKELMDEIHQLEDMFTVDSETLRKVVKHFIDELNKGLTKKGGNIPMIPGWVMEFPTGKESGNYLAIDLGGTNLRVVLVKLSGNHTFDTTQSKYKLPHDMRTTKHQEELWSFIADSLKDFMVEQELLNTKDTLPLGFTFSYPASQNKINEGILQRWTKGFDIPNVEGHDVVPLLQNEISKRELPIEIVALINDTVGTLIASYYTDPETKMGVIFGTGVNGAFYDVVSDIEKLEGKLADDIPSNSPMAINCEYGSFDNEHLVLPRTKYDVAVDEQSPRPGQQAFEKMTSGYYLGELLRLVLLELNEKGLMLKDQDLSKLKQPYIMDTSYPARIEDDPFENLEDTDDIFQKDFGVKTTLPERKLIRRLCELIGTRAARLAVCGIAAICQKRGYKTGHIAADGSVYNKYPGFKEAAAKGLRDIYGWTGDASKDPITIVPAEDGSGAGAAVIAALSEKRIAEGKSLGIIGA

SEQ ID NO: 128 - DNA, 1458 bp, Saccharomyces cerevisiae
atggttcatttaggtccaaagaaaccacaggctagaaagggttccatggctgatgtgcccaaggaattgatggatgaaattcatcagttggaagatatgtttacagttgacagcgagaccttgagaaaggttgttaagcactttatcgacgaattgaataaaggtttgacaaagaagggaggtaacattccaatgattcccggttgggtcatggaattcccaacaggtaaagaatctggtaactatttggccattgatttgggtggtactaacttaagagtcgtgttggtcaagttgagcggtaaccatacctttgacaccactcaatccaagtataaactaccacatgacatgagaaccactaagcaccaagaggagttatggtcctttattgccgactctttgaaggactttatggtcgagcaagaattgctaaacaccaaggacaccttaccattaggtttcaccttctcgtacccagcttcccaaaacaagattaacgaaggtattttgcaaagatggaccaagggtttcgatattccaaatgtcgaaggccacgatgtcgtcccattgctacaaaacgaaatttccaagagagagttgcctattgaaattgtagcattgattaatgatactgttggtactttaattgcctcatactacactgacccagagactaagatgggtgtgattttcggtactggtgtcaacggtgctttctatgatgttgtttccgatatcgaaaagttggagggcaaattagcagacgatattccaagtaactctccaatggctatcaattgtgaatatggttccttcgataatgaacatttggtcttgccaagaaccaagtacgatgttgctgtcgacgaacaatctccaagacctggtcaacaagcttttgaaaagatgacctccggttactacttgggtgaattgttgcgtctagtgttacttgaattaaacgagaagggcttgatgttgaaggatcaagatctaagcaagttgaaacaaccatacatcatggatacctcctacccagcaagaatcgaggatgatccatttgaaaacttggaagatactgatgacatcttccaaaaggactttggtgtcaagaccactctgccagaacgtaagttgattagaagactttgtgaattgatcggtaccagagctgctagattagctgtttgtggtattgccgctatttgccaaaagagaggttacaagactggtcacattgccgctgacggttctgtctataacaaatacccaggtttcaaggaagccgccgctaagggtttgagagatatctatggatggactggtgacgcaagcaaagatccaattacgattgttccagctgaggatggttcaggtgcaggtgctgctgttattgctgcattgtccgaaaaaagaattgccgaaggtaagtctcttggtatcattggcgcttaa

SEQ ID NO: 129 - protein, 500 aa, Saccharomyces cerevisiae
MSFDDLHKATERAVIQAVDQICDDFEVTPEKLDELTAYFIEQMEKGLAPPKEGHTLASDKGLPMIPAFVTGSPNGTERGVLLAADLGGTNFRICSVNLHGDHTFSMEQMKSKIPDDLLDDENVTSDDLFGFLARRTLAFMKKYHPDELAKGKDAKPMKLGFTFSYPVDQTSLNSGTLIRWTKGFRIADTVGKDVVQLYQEQLSAQGMPMIKVVALTNDTVGTYLSHCYTSDNTDSMTSGEISEPVIGCIFGTGTNGCYMEEINKITKLPQELRDKLIKEGKTHMIINVEWGSFDNELKHLPTTKYDVVIDQKLSTNPGFHLFEKRVSGMFLGEVLRNILVDLHSQGLLLQQYRSKEQLPRHLTTPFQLSSEVLSHIEIDDSTGLRETELSLLQSLRLPTTPTERVQIQKLVRAISRRSAYLAAVPLAAILIKTNALNKRYHGEVEIGCDGSVVEYYPGFRSMLRHALALSPLGAEGERKVHLKIAKDGSGVGAALCALVA

SEQ ID NO: 130 - DNA, 1503 bp, Saccharomyces cerevisiae
atgtcattcgacgacttacacaaagccactgagagagcggtcatccaggccgtggaccagatctgcgacgatttcgaggttacccccgagaagctggacgaattaactgcttacttcatcgaacaaatggaaaaaggtctagctccaccaaaggaaggccacacattggcctcggacaaaggtcttcctatgattccggcgttcgtcaccgggtcacccaacgggacggagcgcggtgttttactagccgccgacctgggtggtaccaatttccgtatatgttctgttaacttgcatggagatcatactttctccatggagcaaatgaagtccaagattcccgatgatttgctagacgatgagaacgtcacatctgacgacctgtttgggtttctagcacgtcgtacactggcctttatgaagaagtatcacccggacgagttggccaagggtaaagacgccaagcccatgaaactggggttcactttctcataccctgtagaccagacctctctaaactccgggacattgatccgttggaccaagggtttccgcatcgcggacaccgtcggaaaggatgtcgtgcaattgtaccaggagcaattaagcgctcagggtatgcctatgatcaaggttgttgcattaaccaacgacaccgtcggaacgtacctatcgcattgctacacgtccgataacacggactcaatgacgtccggagaaatctcggagccggtcatcggatgtattttcggtaccggtaccaatgggtgctatatggaggagatcaacaagatcacgaagttgccacaggagttgcgtgacaagttgataaaggagggtaagacacacatgatcatcaatgtcgaatgggggtccttcgataatgagctcaagcacttgcctactactaagtatgacgtcgtaattgaccagaaactgtcaacgaacccgggatttcacttgtttgaaaaacgtgtctcagggatgttcttgggtgaggtgttgcgtaacattttagtggacttgcactcgcaaggcttgcttttgcaacagtacaggtccaaggaacaacttcctcgccacttgactacacctttccagttgtcatccgaagtgctgtcgcatattgaaattgacgactcgacaggtctacgtgaaacagagttgtcattattacagagtctcagactgcccaccactccaacagagcgtgttcaaattcaaaaattggtgcgcgcgatttctaggagatctgcgtatttagccgccgtgccgcttgccgcgatattgatcaagacaaatgctttgaacaagagatatcatggtgaagtcgagatcggttgtgatggttccgttgtggaatactaccccggtttcagatctatgctgagacacgccttagccttgtcacccttgggtgccgagggtgagaggaaggtgcacttgaagattgccaaggatggttccggagtgggtgccgccttgtgtgcgcttgtagcatga

SEQ ID NO: 131 - protein, 570 aa, Saccharomyces cerevisiae
MNSTPDLISPQKSNSSNSYELESGRSKAMNTPEGKNESFHDNLSESQVQPAVAPPNTGKGVYVTVSICCVMVAFGGFIFGWDTGTISGFVAQTDFLRRFGMKHHDGSHYLSKVRTGLIVSIFNIGCAIGGIVLAKLGDMYGRRIGLIVVVVIYTIGIIIQIASINKWYQYFIGRIISGLGVGGITVLSPMLISEVAPSEMRGTLVSCYQVMITLGIFLGYCTNFGTKNYSNSVQWRVPLGLCFAWALFMIGGMMFVPESPRYLVEAGRIDEARASLAKVNKCPPDHPYIQYELETIEASVEEMRAAGTASWGELFTGKPAMFQRTMMGIMIQSLQQLTGDNYFFYYGTIVFQAVGLSDSFETSIVFGVVNFFSTCCSLYTVDRFGRRNCLMWGAVGMVCCYVVYASVGVTRLWPNGQDQPSSKGAGNCMIVFACFYIFCFATTWAPIAYVVISECFPLRVKSKCMSIASAANWIWGFLISFFTPFITGAINFYYGYVFMGCMVFAYFYVFFFVPETKGLSLEEVNDMYAEGVLPWKSASWVPVSKRGADYNADDLMHDDQPFYKSLFSRK

SEQ ID NO: 132 - DNA, 2160 bp, Saccharomyces cerevisiae
gaaactccaccattatctaatgtagcaaaatatttcttaacacccgaagttgcgtgtccccctcacgtttttaatcatttgaattagtatattgaaattatatataaaggcaacaatgtccccataatcaattccatctggggtctcatgttctttccccaccttaaaatctataaagatatcataatcgtcaactagttgatatacgtaaaatcatgaattcaactcccgatctaatatctcctcagaaatccaattcatccaactcatatgaattggaatctggtcgttcaaaggccatgaatactccagaaggtaaaaatgaaagttttcacgacaacttaagtgaaagtcaagtgcaacccgccgttgcccctccaaacaccggaaaaggtgtctacgtaacggtttctatctgttgtgttatggttgctttcggtggtttcatatttggatgggatactggtaccatttctggttttgttgctcaaactgattttctaagaagatttggtatgaagcaccacgacggtagtcattacttgtccaaggtgagaactggtttaattgtctctatttttaacattggttgtgccattggtggtatcgtcttagccaagctaggtgatatgtatggtcgtagaatcggtttgattgtcgttgtagtaatctacactatcggtatcattattcaaatagcctcgatcaacaagtggtaccaatatttcattggtagaattatctctggtttaggtgtcggtggtatcacagttttatctcccatgctaatatctgaggtcgcccccagtgaaatgagaggcaccttggtttcatgttaccaagtcatgattactttaggtattttcttaggttactgtaccaattttggtaccaagaattactcaaactctgtccaatggagagttccattaggtttgtgtttcgcctgggccttatttatgattggtggtatgatgtttgttcctgaatctccacgttatttggttgaagctggcagaatcgacgaagccagggcttctttagctaaagttaacaaatgcccacctgaccatccatacattcaatatgagttggaaactatcgaagccagtgtcgaagaaatgagagccgctggtactgcatcttggggcgaattattcactggtaaaccagccatgtttcaacgtactatgatgggtatcatgattcaatctctacaacaattaactggtgataactatttcttctactacggtaccattgttttccaggctgtcggtttaagtgactcttttgaaacttctattgtctttggtgtcgtcaacttcttctccacttgttgttctctgtacaccgttgaccgttttggccgtcgtaactgtttgatgtggggtgctgtcggtatggtctgctgttatgttgtctatgcctctgttggtgttaccagattatggccaaacggtcaagatcaaccatcttcaaagggtgctggtaactgtatgattgttttcgcatgtttctacattttctgtttcgctactacctgggccccaattgcttacgttgttatttcagaatgtttcccattaagagtcaaatccaagtgtatgtctattgccagtgctgctaactggatctggggtttcttgattagtttcttcaccccatttattactggtgccatcaacttctactacggttacgttttcatgggctgtatggttttcgcttacttttacgtctttttcttcgttccagaaactaaaggtttatcattagaagaagttaatgatatgtacgccgaaggtgttctaccatggaaatcagcttcctgggttccagtatccaagagaggcgctgactacaacgctgatgacctaatgcatgatgaccaaccattttacaagagtttgtttagcaggaaataaactaaacaagctcaatatgcatattttaatgacttatacagtatttaatttctcagtaaattttataaaggtgatattatattggtgttaaaacaaaattcttgtcaaattcataaacagatgttcttttctttgctagttcttgaccttcaccaaggaacaagaaatttcattctggcactcttccgaggaaaaattttatatgatatagtatgggttaataccacatagg

SEQ ID NO: 133 - protein, 541 aa, Saccharomyces cerevisiae
MSEFATSRVESGSQQTSIHSTPIVQKLETDESPIQTKSEYTNAELPAKPIAAYWTVICLCLMIAFGGFVFGWDTGTISGFVNQTDFKRRFGQMKSDGTYYLSDVRTGLIVGIFNIGCAFGGLTLGRLGDMYGRRIGLMCVVLVYIVGIVIQIASSDKWYQYFIGRIISGMGVGGIAVLSPTLISETAPKHIRGTCVSFYQLMITLGIFLGYCTNYGTKDYSNSVQWRVPLGLNFAFAIFMIAGMLMVPESPRFLVEKGRYEDAKRSLAKSNKVTIEDPSIVAEMDTIMANVETERLAGNASWGELFSNKGAILPRVIMGIMIQSLQQLTGNNYFFYYGTTIFNAVGMKDSFQTSIVLGIVNFASTFVALYTVDKFGRRKCLLGGSASMAICFVIFSTVGVTSLYPNGKDQPSSKAAGNVMIVFTCLFIFFFAISWAPIAYVIVAESYPLRVKNRAMAIAVGANWIWGFLIGFFTPFITSAIGFSYGYVFMGCLVFSFFYVFFFVCETKGLTLEEVNEMYVEGVKPWKSGSWISKEKRVSEE

SEQ ID NO: 134 - DNA, 2890 bp, Saccharomyces cerevisiae
aaaaagaaatattattcattactatcaagataccgtagaaaagaaaaagaaccggggatgaataataacaaaacgggctgctttttctttttctctttctttttcatttggtccctctccactctttctccacgtggctttgcttcccgtatttttcttcgtcagagagactacatgatagtccaaagaaaagaaacaggggggacgaagaagaggagaggaaaaaccaaaatataattttccgtgaaatagattctttttctccactgcacgacttcttctcctcccacaaaaaatgacgcctcatagacagccccgcagcttcacttttaagtttctttttctcctcacggcgcaaccgctaacttaagctaatccttatgaatccggagaaaagcggggtcttttaactcaataaaattttccgaaatcctttttcctacgcgttttcttcgggaactagataggtggctcttccacctgtttttccatcattttagtttttcgcaagccatgcgtgccttttcgtttttgcgatggcgaacgagggctggaaaaattaacggtacgccgcctaacgatagtaataggccacgcaactggcgtggacgacaacaataagtcgcccattttttatgttttcaaaacctagcaacccccaccaaacttgtcatcgttcccggattcacaaatgatataaaaagcgattacaattctacattctaaccagatttgagatttcctctttctcaattcctcttatattagattataagaacaacaaattaaattacaaaaagacttataaagcaacataatgtctgaattcgctactagccgcgttgaaagtggctctcaacaaacttctatccactctactccgatagtgcagaaattagagacggatgaatctcctattcaaaccaaatctgaatacactaacgctgaactcccagcaaagccaatcgccgcatattggactgttatctgtttatgtctaatgattgcatttggtgggtttgtctttggttgggatactggtaccatctctggttttgttaatcaaaccgatttcaaaagaagatttggtcaaatgaaatctgatggtacctattatctttcggacgtccggactggtttgatcgttggtatcttcaatattggttgtgcctttggtgggttaaccttaggacgtctgggtgatatgtatggacgtagaattggtttgatgtgcgtcgttctggtatacatcgttggtattgtgattcaaattgcttctagtgacaaatggtaccaatatttcattggtagaattatctctggtatgggtgtcggtggtattgctgtcctatctccaactttgatttccgaaacagcaccaaaacacattagaggtacctgtgtttctttctatcagttaatgatcactctaggtattttcttaggttactgtaccaactatggtactaaagactactccaattcagttcaatggagagtgcctttgggtttgaactttgccttcgctattttcatgatcgctggtatgctaatggttccagaatctccaagattcttagtcgaaaaaggcagatacgaagacgctaaacgttctttggcaaaatctaacaaagtcaccattgaagatccaagtattgttgctgaaatggatacaattatggccaacgttgaaactgaaagattagccggtaacgcttcttggggtgagttattctccaacaaaggtgctattttacctcgtgtgattatgggtattatgattcaatccttacaacaattaactggtaacaattacttcttctattatggtactactattttcaacgccgtcggtatgaaagattctttccaaacttccatcgttttaggtatagtcaacttcgcatccactttcgtggccttatacactgttgataaatttggtcgtcgtaagtgtctattgggtggttctgcttccatggccatttgttttgttatcttctctactgtcggtgtcacaagcttatatccaaatggtaaagatcaaccatcttccaaggctgccggtaacgtcatgattgtctttacctgtttattcattttcttcttcgctattagttgggccccaattgcctacgttattgttgccgaatcctatcctttgcgtgtcaaaaatcgtgctatggctattgctgttggtgccaactggatttggggtttcttgattggtttcttcactcccttcattacaagtgcaattggattttcatacgggtatgtcttcatgggctgtttggtattttcattcttctacgtgtttttctttgtctgtgaaaccaagggcttaacattagaggaagttaatgaaatgtatgttgaaggtgtcaaaccatggaaatctggtagctggatctcaaaagaaaaaagagtttccgaggaataagagattatacttaaactagcactgatttttttaaggctaatggctactaatactttaatagatgatcttcatacttttttatttaacgatttttaatgatgtttttatttgtaccactcatttatctagatttttttaatactgatcaaatcttacggactcgacgttaaaaagttcctacatacgtctggtacttgaaacgctgcttcgaggtattgacactataagaatacgatccaaatacttacaccgcatgtaaaaatatgccgacaatatgaatacttgttgatgaatgatatttgattttaatccggcaatttacctcctttatataatccaataattgttgataattagtggttaggttgcagtactaataagaattaagacaaatattcttctactatataaaaggtgcaaacaaaacacacgccgatcggccatact

SEQ ID NO: 135 - protein, 567 aa, Saccharomyces cerevisiae
MNSTPDLISPQKSSENSNADLPSNSSQVMNMPEEKGVQDDFQAEADQVLTNPNTGKGAYVTVSICCVMVAFGGFVFGWDTGTISGFVAQTDFLRRFGMKHKDGSYYLSKVRTGLIVSIFNIGCAIGGIILAKLGDMYGRKMGLIVVVVIYIIGIIIQIASINKWYQYFIGRIISGLGVGGIAVLSPMLISEVAPKEMRGTLVSCYQLMITLGIFLGYCTNFGTKNYSNSVQWRVPLGLCFAWALFMIGGMTFVPESPRYLVEAGQIDEARASLSKVNKVAPDHPFIQQELEVIEASVEEARAAGSASWGELFTGKPAMFKRTMMGIMIQSLQQLTGDNYFFYYGTTVFNAVGMSDSFETSIVFGVVNFFSTCCSLYTVDRFGRRNCLLYGAIGMVCCYVVYASVGVTRLWPNGEGNGSSKGAGNCMIVFACFYIFCFATTWAPIAYVVISETFPLRVKSKAMSIATAANWLWGFLIGFFTPFITGAINFYYGYVFMGCMVFAYFYVFFFVPETKGLTLEEVNDMYAEGVLPWKSASWVPTSQRGANYDADALMHDDQPFYKKMFGKK

SEQ ID NO: 136 - DNA, 2114 bp, Saccharomyces cerevisiae
ggatcggtaactctgattatcacagagaaagcttcgtggagaatttttccagattttccgctttccccgatgttggtatttccggaggtcattatactgaccgccattataatgactgtacaacgaccttctggagaaagaaacaactcaataacgatgtgggacattgggggcccactcaaaaaatctggggactatatccccagagaatttctccagaagagaagaaaagtcaaagttttttttcgcttgggggttgcatataaatacaggcgctgttttatcttcagcatgaatattccataattttacttaatagcttttcataaataatagaatcacaaacaaaatttacatctgagttaaacaatcatgaattcaactccagatttaatatctccacaaaagtcaagtgagaattcgaatgctgacctgccttcgaatagctctcaggtaatgaacatgcctgaagaaaaaggtgttcaagatgatttccaagctgaggccgaccaagtacttaccaacccaaatacaggtaaaggtgcatatgtcactgtgtctatctgttgtgttatggttgccttcggtggtttcgttttcggttgggatactggtaccatttctggtttcgtcgcccaaactgatttcttgagaagattcggtatgaagcataaagatggtagttattatttgtctaaggttagaactggtttaattgtctccattttcaacattggttgtgccattggtggtattattttggctaaattgggtgatatgtacggtcgtaaaatgggtttgattgtcgttgttgttatctacatcatcggtattattattcaaattgcatccatcaacaaatggtaccaatatttcatcggtagaattatttccggtttgggtgttggtggtattgccgttttatctcctatgttgatttctgaagtcgctcctaaggaaatgagaggtactttagtctcctgttaccaactgatgattaccttgggtattttcttgggttactgtaccaacttcggtactaagaactactccaactctgtgcaatggagagttccattaggtttgtgttttgcctgggctttgtttatgatcggtggtatgactttcgttccagaatccccacgttatttggttgaagctggtcaaattgacgaagcaagagcatctctttccaaagttaacaaggttgccccagaccatccattcattcaacaagagttggaagttattgaagctagtgttgaagaagctagagctgctggttcagcatcatggggtgagttgttcactggtaagccggccatgtttaagcgtactatgatgggtatcatgatccaatctctacaacaattgactggtgataactatttcttctactatggtactaccgtttttaacgctgttggtatgagtgattctttcgaaacttctattgttttcggtgtcgtcaacttcttctctacttgttgttctttgtacactgtcgatcgttttggacgtcgtaactgtttgttatatggtgccattggtatggtctgctgttatgtagtttacgcttctgttggtgtcaccagactatggccaaatggtgaaggtaatggttcatccaagggtgctggtaactgtatgattgtctttgcctgtttctatattttctgttttgctaccacttgggctccaattgcttatgttgttatttctgaaactttcccattgagagtcaagtctaaggctatgtctattgctacagctgctaattggttgtggggtttcttgattggtttcttcactccatttattactggtgctattaacttctactacggttacgttttcatgggctgtatggttttcgcctacttctacgttttcttctttgtgccagaaactaagggtttgactttggaagaagtcaatgatatgtacgctgaaggtgttctaccatggaagtctgcttcatgggttccaacatctcaaagaggtgctaactacgatgctgatgcattgatgcatgatgaccagccattctacaagaaaatgttcggcaagaaataatttcacgctaaaccgtagtgctgaataatagtgtattt

SEQ ID NO: 137 - protein, 560 aa, Saccharomyces cerevisiae
MSEEAAYQEDTAVQNTPADALSPVESDSNSALSTPSNKAERDDMKDFDENHEESNNYVEIPKKPASAYVTVSICCLMVAFGGFVFGWDTGTISGFVAQTDFIRRFGMKHHDGTYYLSKVRTGLIVSIFNIGCAIGGIILAKLGDMYGRKMGLIVVVVIYIIGIIIQIASINKWYQYFIGRIISGLGVGGIAVLSPMLISEVSPKHIRGTLVSCYQLMITLGIFLGYCTNYGTKTYTNSVQWRVPLGLGFAWALFMIGGMTFVPESPRYLVEVGKIEEAKRSIALSNKVSADDPAVMAEVEVVQATVEAEKLAGNASWGEIFSTKTKVFQRLIMGAMIQSLQQLTGDNYFFYYGTTVFTAVGLEDSFETSIVLGIVNFASTFVGIFLVERYGRRRCLLWGAASMTACMVVFASVGVTRLWPNGKKNGSSKGAGNCMIVFTCFYLFCFATTWAPIPFVVNSETFPLRVKSKCMAIAQACNWIWGFLIGFFTPFISGAIDFYYGYVFMGCLVFSYFYVFFFVPETKGLTLEEVNTLWEEGVLPWKSPSWFHQTREVLTTTLMI

SEQ ID NO: 138 - DNA, 2099 bp, Saccharomyces cerevisiae
agcttcaacactggggaatgaataatatgtcatctagaaaaaatttatataatactcagtgtttatcatatctcggatcatcactcatctctcatgagtaatagaaaccataaagaaaagatatatcaagcctcttatcaaggttggttttgaacactttacaataaaatctgccaaaaatgtctgaagaagctgcctatcaagaggatacagcagtccaaaatactccagctgatgctttgtcgccagttgaatccgattctaattccgctttgtctactccatccaacaaagctgaaagagatgacatgaaagatttcgacgagaatcacgaagaatctaataactacgttgaaattccaaagaagcccgcctccgcctacgttacagtttccatctgttgtttaatggttgctttcggtggttttgttttcggttgggatactggtaccatttctggttttgttgctcaaactgattttatcagaagatttggtatgaagcaccacgatggtacttattatttgtctaaggttagaactggtttaattgtctccattttcaacattggttgtgccattggtggtattattttagcaaaattaggtgatatgtatggtcgtaaaatgggtttgattgtcgttgttgtcatctacattatcggtatcattatccaaattgcctcaatcaacaagtggtaccaatatttcattggtagaattatctctggtttaggtgtcggtggtattgccgttttatctcctatgttgatttctgaagtctctccaaagcatattagaggtactttggtttcatgttaccaacttatgattactttgggtattttcttgggttactgtacaaactacggtaccaagacctacaccaattctgtccaatggagagttccattaggtctaggtttcgcttgggctttgtttatgattggtggtatgacattcgttccagaatctccacgttatttagttgaagtcggtaaaattgaagaagctaagcgttctattgctctttcaaataaggtcagcgcagacgatccagctgttatggctgaagtcgaagttgttcaagctacagttgaagctgaaaaattagctggtaatgcctcctggggtgaaatatttagcactaagactaaggttttccaacgtttgatcatgggtgctatgattcaatcattgcaacaattgacaggtgataactatttcttctattacggtactaccgttttcactgctgtcggtttggaagattcttttgaaacttctattgtcttgggtattgtcaactttgcttccacctttgttggtattttcttagtcgaaagatatggtcgtcgtagatgtttattatggggtgctgcttccatgacagcttgtatggttgttttcgcttctgttggtgttacaagattgtggccaaatggtaagaagaacgggtcttctaagggtgctggtaactgtatgattgtcttcacatgtttctacttattctgttttgccactacctgggctccaattccatttgttgttaactctgaaactttcccattgagagttaagtccaagtgtatggctattgctcaagcttgtaactggatctggggtttcttgattggtttctttactccatttatttcaggtgctattgatttctactacggttatgttttcatgggctgtttggtcttttcttacttctacgtcttcttcttcgttccagaaactaaaggtttgactttagaagaagttaacaccttatgggaagaaggtgttttgccatggaaatcaccttcttgggttccaccaaacaagagaggtactgactacaacgctgatgatctaatgcatgatgatcaaccattttacaagaagatgttcggaaaaaagtaggtcagttaattaaataatatagacttccttcaaggaataaaaataatatttgatccttccaatttttaacgctttatgaaatatatatttatgatttaatagtttatagataatactttatcaaactacaattttgaattatgttttttgtttcatagttgtggaagaggttaggaataggccgaattc

SEQ ID NO: 139 - protein, 592 aa, Saccharomyces cerevisiae
MSELENAHQGPLEGSATVSTNSNSYNEKSGNSTAPGTAGYNDNLAQAKPVSSYISHEGPPKDELEELQKEVDKQLEKKSKSDLLFVSVCCLMVAFGGFVFGWDTGTISGFVRQTDFIRRFGSTRANGTTYLSDVRTGLMVSIFNIGCAIGGIVLSKLGDMYGRKIGLMTVVVIYSIGIIIQIASIDKWYQYFIGRIISGLGVGGITVLAPMLISEVSPKQLRGTLVSCYQLMITFGIFLGYCTNFGTKNYSNSVQWRVPLGLCFAWSIFMIVGMTFVPESPRYLVEVGKIEEAKRSLARANKTTEDSPLVTLEMENYQSSIEAERLAGSASWGELVTGKPQMFRRTLMGMMIQSLQQLTGDNYFFYYGTTIFQAVGLEDSFETAIVLGVVNFVSTFFSLYTVDRFGRRNCLLWGCVGMICCYVVYASVGVTRLWPNGQDQPSSKGAGNCMIVFACFYIFCFATTWAPVAYVLISESYPLRVRGKAMSIASACNWIWGFLISFFTPFITSAINFYYGYVFMGCMVFAYFYVFFFVPETKGLTLEEVNEMYEENVLPWKSTKWIPPSRRTTDYDLDATRNDPRPFYKRMFTKEK

SEQ ID NO: 140 - DNA, 3025 bp, Saccharomyces cerevisiae
aagctttttgcactgaaaatattctgggttaacaaggtttaaagaagcaaactgccacaaagtatatgagagtataaccggacggtacctatactttgaagttggaataaatacggggtagacaaaaaggatgtgtttctgtatgtctgatgagaatgatgtcatcaaagaacgtaaacaacagtaactgtctatattcttgctttttattatgcgctgttacagcaggtagcggagttttcagttctttccctagtatgtagtatgaaggataatacggtaaaagaacggggctcttgattcatcatataaatttattttcccctgttgaaacctcgagtaaccgtcctcactgttttattaccaaggatgagctcgagcagttgtaagagagaagtgggcagaaaagtataagtaacaagaaacgatatacaagttcttgttgttaggcgtagcaaccctttctcccctggtttgatcctacttaaaataaagaaaaaaaacaaaaacgtcatgatgattttgatattattagacatacgtaatttagttgaattaaaggaataacaggcagccctattaaccacggacaaaatatctctgcatatgattgcattatttgtaaactatgaatgaacatatgaacgaaaacgattaatattaatattaaaatttgaaatggtgcaatgctgaacattgcaagtatgcgaaaatagttgatcctacactacaagagattatttttctttagtgaacatccttttataaaatggtctcggatcatttctagtagcgtctaggtcataatctgttgttctcctagatggtgggatccatttggtagacttccaaggtagcacattttcttcatacatttcgttgacttcttctaatgttaagccctttgtctctggaacaaagaagaacacataaaagtatgcgaacaccatacaacccataaagacatagccataatagaaattgattgctgaagtaataaatggagtgaaaaaactgatcaagaacccccaaatccagttacaggcacttgcaatcgacattgctttaccacgtactcttaagggatacgactcagagataaggacataggcaacgggggcccaagtggtagcgaaacagaaaatgtagaaacatgcgaaaacaatcatacagttaccagcaccctttgaagatggttgatcttgaccgtttggccataatctggtaacaccaacagaggcatagacgacatagcaacaaatcatacctacacagccccataacaaacaattacgacgaccaaaacgatcgacggtatatagcgagaaaaaagtcgaaacaaaattaacaacacccaaaacaatagcagtttcaaatgaatcttccaaaccaacagcctggaaaattgtagtaccatagtaaaagaagtaattgtcacctgtcagctgttgtaaagattgaatcatcatacccattagtgtacgtctgaacatctggggcttaccagtaaccaattccccccaagaagcagagcccgccaatctctcagcttcaatagaagactgatagttctccatttctaaagttactaaaggagagtcttcagtggttttgttagctcttgctaaggaccgcttggcctcttcaatttttcccacttctaccagataacgtggggattcaggaacgaacgtcataccaacaatcataaaaatagaccatgcaaagcataagcctaatggtaccctccattggacagagtttgagtaattcttggtaccaaaattagtacaatatcccaaaaagataccgaaagtgatcattaattggtaacatgaaaccagagtaccacgcaactgcttaggcgacacttcagaaattagcataggcgccaaaactgtaataccaccaacgcccagtcctgagatgattcttccaatgaaatattgataccatttgtcaatggaggcgatttggatgatgatcccaattgagtaaatgacgacaacagtcatcagaccaatcttacgtccatacatatcaccgagctttgacaaaactatacctccgatagcgcagccgatgttgaaaatagaaaccatcaaaccggttctgacatcggaaagataggtagtcccgtttgcacgggtgctgccaaatcgcctaatgaagtctgtttgcctgacaaaaccagatatagtaccagtatcccacccaaacacgaacccaccaaaagcaaccatcaaacagcagacggatacaaatagtaaatccgacttcgatttcttctctagttgtttgtcaacctccttctgaagctcttccagttcgtctttgggagggccttcatgggaaatgtaacttgagacgggtttagcttgtgccaaattatcgttgtaaccggcggtaccaggagcagtcgagtttcctgacttctcgttgtatgagttagaatttgtgctcacagtagcagacccttccaaggggccttgatgagcgttttcaagttccgacattctttctttacctctaatatattcttttttctagaaaaataatattttttgctggttttaacaaagctatgaagtaaaattgcaaagtgaaagcgaatcttgtttgcgtatattatatatagaaaaattattcaatcgacttttctctttcttttgatagtttcttattcttagagggagaaccgttcgactagcatgaaaagaaaagagagagactcttttatacgtgaaatcaaaaagaaaccaaacttgaggtactctactaatgattctggccctcctttcttgtttactccgtgcccctaaaactaattaacccatgcccatatattcatccacacgaccattaatattgaacataaagatatcatttcaccaagcagtacttcactcaataacaaggtgtgaaatccggtatattattccatcgctatgagtgcgggatcagaaagtgaattacttactgtcccctaatgtgcacagccacggggaatgcggatcaactgcag

SEQ ID NO: 141 - protein, 570 aa, Saccharomyces cerevisiae
MSQDAAIAEQTPVEHLSAVDSASHSVLSTPSNKAERDEIKAYGEGEEHEPVVEIPKRPASAYVTVSIMCIMIAFGGFVFGWDTGTISGFINQTDFIRRFGMKHKDGTNYLSKVRTGLIVSIFNIGCAIGGIILSKLGDMYGRKVGLIVVVVIYIIGIIIQIASINKWYQYFIGRIISGLGVGGIAVLSPMLISEVSPKHLRGTLVSCYQLMITAGIFLGYCTNFGTKNYSNSVQWRVPLGLCFAWALFMIGGMTFVPESPRYLAEVGKIEEAKRSIAVSNKVAVDDPSVLAEVEAVLAGVEAEKLAGNASWGELFSSKTKVLQRLIMGAMIQSLQQLTGDNYFFYYGTTIFKAVGLSDSFETSIVLGIVNFASTFVGIYVVERYGRRTCLLWGAASMTACMVVYASVGVTRLWPNGQDQPSSKGAGNCMIVFACFYIFCFATTWAPIPYVVVSETFPLRVKSKAMSIATAANWLWGFLIGFFTPFITGAINFYYGYVFMGCLVFMFFYVLLVVPETKGLTLEEVNTMWEEGVLPWKSASWVPPSRRGANYDAEEMAHDDKPLYKRMFSTK

SEQ ID NO: 142 - DNA, 2037 bp, Saccharomyces cerevisiae
ctcgagaaaagacatatggtttgtaactatcttcttcttttttccaatttttctgttttaataataaaaaaacaagaacaaacaagctcaacttgtcttttctaagaacaaagaataaacacaaaaacaaaaagtttttttaattttaatcaaaaaatgtcacaagacgctgctattgcagagcaaactcctgtggagcatctctctgctgttgactcagcctcccactcggttttatctacaccatcaaacaaggctgaaagagatgaaataaaagcttatggtgaaggtgaagagcacgaacctgtcgttgaaattccaaagagaccagcttctgcctatgtcactgtctctattatgtgtatcatgatcgcctttggtggtttcgttttcggttgggatactggtaccatttctggtttcatcaatcaaaccgatttcatcagaagatttggtatgaagcataaagatggtactaattatttgtctaaggttagaactggtttgattgtctccattttcaacattggttgtgccattggtggtattattctttccaaattgggtgatatgtacggtcgtaaggtgggtttgattgtcgttgttgtcatctacatcatcggtattattattcaaattgcatctatcaacaaatggtaccaatatttcatcggtagaattatttccggtttgggtgttggtggtattgccgttttatctcctatgttgatttctgaagtatccccaaagcatttaaggggtactttagtctcttgctaccaattgatgattactgccggtattttcttgggttactgtaccaacttcggtactaagaactactccaactctgtgcaatggagagttccattaggtttgtgttttgcctgggctttgtttatgattggtggtatgacatttgttccagagtctccacgttatttggctgaagtcggtaagatcgaagaagccaaacgttctattgccgtttctaacaaggttgctgttgatgatccatctgttttggctgaaatcgaagctgtcttggctggtgtagaggcagagaaattagctggtaatgcatcctggggtgaattgtttagtagcaagacaaaggtccttcaacgtttgatcatgggtgctatgattcaatctctacaacaattgacaggtgataactatttcttctactatggtactactattttcaaggctgttggtttgagtgactctttcgaaacctctattgtcttgggtattgttaactttgcttccacctttgttggtatttacgttgttgagagatatggtcgtcgtacttgtttgctatggggtgctgcatccatgactgcttgtatggttgtctatgcttccgtgggtgtcaccagattatggccaaatggtcaagaccaaccatcttccaagggtgctggtaactgtatgattgtctttgcctgtttctatattttctgttttgctactacatgggctccaattccttatgtcgttgtttctgaaactttcccattgagagtcaagtctaaggctatgtctattgctacagctgctaattggttgtggggtttcttgattggtttcttcactccatttattactggtgctattaacttctactacggttacgttttcatgggctgtttggtcttcatgttcttctatgttttgttagttgttccagaaactaagggtttgactttggaagaagtcaacaccatgtgggaagaaggtgttctaccatggaagtctgcctcatgggttccaccatctagaagaggtgccaactacgacgctgaagaaatggctcacgatgataagccattgtacaagagaatgttcagcaccaaataatttgcgaacatttttattaattcatgatcacgctctaatttgtgcatttgaaatgctctctaattctgattttatattttttaatgaacccttacgatttatattgtatggcaagatgttgccaatagaagtataattttttattaattttttttcttttctaagctt

SEQ ID NO: 143 - protein, 570 aa, Saccharomyces cerevisiae
MSQDAAIAEQTPVEHLSAVDSASHSVLSTPSNKAERDEIKAYGEGEEHEPVVEIPKRPASAYVTVSIMCIMIAFGGFVFGWDTGTISGFINQTDFIRRFGMKHKDGTNYLSKVRTGLIVSIFNIGCAIGGIILSKLGDMYGRKVGLIVVVVIYIIGIIIQIASINKWYQYFIGRIISGLGVGGIAVLSPMLISEVSPKHLRGTLVSCYQLMITAGIFLGYCTNFGTKNYSNSVQWRVPLGLCFAWALFMIGGMTFVPESPRYLAEVGKIEEAKRSIAVSNKVAVDDPSVLAEVEAVLAGVEAEKLAGNASWGELFSSKTKVLQRLIMGAMIQSLQQLTGDNYFFYYGTTIFKAVGLSDSFETSIVLGIVNFASTFVGIYVVERYGRRTCLLWGAASMTACMVVYASVGVTRLWPNGQDQPSSKGAGNCMIVFACFYIFCFATTWAPIPYVVVSETFPLRVKSKAMSIATAANWLWGFLIGFFTPFITGAINFYYGYVFMGCLVFMFFYVLLVVPETKGLTLEEVNTMWEEGVLPWKSASWVPPSRRGANYDAEEMTHDDKPLYKRMFSTK

SEQ ID NO: 144 - DNA, 2209 bp, Saccharomyces cerevisiae
aaaaggaggaaaatacaaaatatactagaactgaaaaaaaaaaagtataaatagagacgatatatgccaatacttcacaatgttcgaatctattcttcatttgcagctattgtaaaataataaaacatcaagaacaaacaagctcaacttgtcttttctaagaacaaagaataaacacaaaaacaaaaagtttttttaattttaatcaaaaaatgtcacaagacgctgctattgcagagcaaactcctgtggagcatctctctgctgttgactcagcctcccactcggttttatctacaccatcaaacaaggctgaaagagatgaaataaaagcttatggtgaaggtgaagagcacgaacctgtcgttgaaattccaaagagaccagcttctgcctatgtcactgtctctattatgtgtatcatgatcgcctttggtggtttcgttttcggttgggatactggtaccatttctggtttcatcaatcaaaccgatttcatcagaagatttggtatgaagcataaagatggtactaattatttgtctaaggttagaactggtttgattgtctccattttcaacattggttgtgccattggtggtattattctttccaaattgggtgatatgtacggtcgtaaggtgggtttgattgtcgttgttgtcatctacatcatcggtattattattcaaattgcatctatcaacaaatggtaccaatatttcatcggtagaattatttccggtttgggtgttggtggtattgccgttttatctcctatgttgatttctgaagtatccccaaagcatttaaggggtactttagtctcttgctaccaattgatgattactgccggtattttcttgggttactgtaccaacttcggtactaagaactactccaactctgtgcaatggagagttccattaggtttgtgttttgcctgggctttgtttatgattggtggtatgacatttgttccagagtctccacgttatttggctgaagtcggtaagatcgaagaagccaaacgttctattgccgtttctaacaaggttgctgttgatgatccatctgttttggctgaagtcgaagctgtcttggctggtgtagaggcagagaaattagctggtaatgcatcctggggtgaattgtttagtagcaagacaaaggtccttcagcgtttgatcatgggtgctatgattcaatctctacaacaattgacaggtgataactatttcttctactatggtactactattttcaaggctgttggtttgagtgactctttcgaaacctctattgtcttgggtattgttaactttgcttccacctttgttggtatttacgttgttgagagatatggtcgtcgtacttgtttgctatggggtgctgcatccatgactgcttgtatggttgtctatgcttccgtgggtgtcaccagattatggccaaatggtcaagaccaaccatcttccaagggtgctggtaactgtatgattgtctttgcctgtttctatattttctgttttgctactacatgggctccaattccttatgtcgttgtttctgaaactttcccattgagagtcaagtctaaggctatgtctattgctacagctgctaattggttgtggggtttcttgattggtttcttcactccatttattactggtgctattaacttctactacggttacgttttcatgggctgtttggtcttcatgttcttctatgttttgttagttgttccagaaactaagggtttgactttggaagaagtcaacaccatgtgggaagaaggtgttctaccatggaagtctgcctcatgggttccaccatccagaagaggtgccaactacgacgctgaagaaatgactcacgatgacaagccattgtacaagagaatgttcagcaccaaataatttgcgaacacttttattaattcatgatcacgctctaatttgtgcatttgaaatgtactctaattctaattttatatttttaatgatatcttgaaaagtaaatacgtttttaatatataccaaaataatacagtttaattttcaagtttttgatcatttgttctcagaaagttgagtgggacggagacaaagaaactttaaagagaaatgcaaagtgggaagaagtcagttgtttaccgaccgcactgttattcacaaatattccaattttgcctgcaggtcga

SEQ ID NO: 145 - protein, 433 aa, Saccharomyces cerevisiae
MFVSPPPATSKNQVLQRRPLESTNSNHGFASSLQAIPENTMSGSDNASFQSLPLSMSSSQSTTSSRRENFVNAPPEYTDRARDEIKKRLLASSPSRRSHHSSSMHSASRRSSVAESGSLLSDNASSYQSSIFSAPSTVHTQLTNDSSFSEFPNHKLITRVSLDEALPKTFYDMYSPDILLADPSNILCNGRPKFTKRELLDWDLNDIRSLLIVEKLRPEWGNQLPEVITVGDNMPQFRLQLLPLYSSDETIIATLVHSDLYMEANLDYEFKLTSAKYTVATARKRHEHITGRNEAVMNLSKPEWRNIIENYLLNIAVEAQCRFDFKQRCSEYKKWKLQQSNLKRPDMPPPSIIPRKNSTETKSLLKKALLKNIQLKNPNNNLDELMMRSSAATNQQGKNKVSLSKEEKATIWSQCQAQVYQRLGLDWQPDSVS

SEQ ID NO: 146 - DNA, 1671 bp, Saccharomyces cerevisiae
tcatcccacattttattgctgcctcaatctccattaagaaaaaaaatttatataaccaaatgacatttttcctttcttctcaaactttgtaatgcgcctgtaactgcttctttttttattaaaaaacagcatggagttttttaataacttaaggaaacatacaaaaagatttgttcatttcactccaagtattttttaacgtatattgaaagttctcaatagcgaaaccacaagcagcaatacaaagagaattttattcgaacgcatagagtacacacactcaaaggaatgtttgtttcaccaccaccagcaacttcgaaaaaccaagttttacaacgacgtccattagaatcgactaacagtaatcatgggtttgcaagctccctacaggccattccggaaaacacgatgagtggcagtgataatgcttcttttcaaagtttgccactatcaatgagtagctctcaatccacgacttcttcgagaagagagaactttgtgaatgctcctccggagtacactgatagagctagagatgagattaaaaaaagattattggcctcctcacctagcagaaggtcacatcattcaagcagtatgcattcagcgagcaggagatcaagcgtggctgaaagtgggagtttactttcggataatgcctcgtcttatcaatcaagtatattttctgccccctctactgtgcacacgcaactaactaatgactcttcgttctccgaatttcctaaccacaagttaatcacgagagtgagcctggatgaagcattacccaaaacgttttatgacatgtattcgccagatattctattagcagacccatccaacattctctgtaacgggcgtcccaagtttaccaagagagagttattggattgggatttaaacgatataagatcgttattgatagtcgagaagttaaggcccgaatggggtaatcaactaccggaagtaataacggtgggtgataatatgccccagtttaggttacaattattaccactatattctagcgatgagaccataatcgcaacgttagtccattcggatctgtacatggaggctaacttagattatgaattcaaactaaccagcgccaaatatacagtagcgaccgctagaaaaagacatgagcatataactggtagaaatgaagccgtcatgaatttgtcgaaaccggaatggagaaatatcatcgaaaattacctcttaaatatagcagtagaggcacaatgcaggtttgatttcaaacaaagatgctccgaatataagaaatggaagttacaacagtccaacttaaaaagaccggacatgcccccaccaagcataataccgcggaaaaacagcacagaaacaaaatcgcttctgaaaaaggctttattgaagaacattcagttgaaaaaccccaataataaccttgatgaattgatgatgagatcaagcgccgcaacaaatcaacagggaaaaaacaaagtcagcttatctaaagaagaaaaggctacgatatggtcgcaatgtcaggcacaagtttaccaaagattaggattggattggcagccggattcagtatcctgaagatactaaaaagaaaccttcccgatggtttttttggagactcttcgattgtatcaatactatcccatggacatcagtttt

SEQ ID NO: 147 - protein, 358 aa, Saccharomyces cerevisiae
MFVSPPPATSKNQVLQRRPLESTNSNHGFASSLQAIPENTMSGSDNASFQSLPLSMFSAPSTVHTQLTNDSSFSEFPNHKLITRVSLDEALPKTFYDMYSPDILLADPSNILCNGRPKFTKRELLDWDLNDIRSLLIVEKLRPEWGNQLPEVITVGDNMPQFRLQLLPLYSSDETIIATLVHSDLYMEANLDYEFKLTSAKYTVATARKRHEHITGRNEAVMNLSKPEWRNIIENYLLNIAVEAQCRFDFKQRCSEYKKWKLQQSNLKRPDMPPPSIIPRKNSTETKSLLKKALLKNIQLKNPNNNLDELMMRSSAATNQQGKNKVSLSKEEKATIWSQCQAQVYQRLGLDWQPDSVS

SEQ ID NO: 148 - DNA, 1077 bp, Saccharomyces cerevisiae
atgtttgtttcaccaccaccagcaacttcgaaaaaccaagttttacaacgacgtccattagaatcgactaacagtaatcatgggtttgcaagctccctacaggccattccggaaaacacgatgagtggcagtgataatgcttcttttcaaagtttgccactatcaatgttttctgccccctctactgtgcacacgcaactaactaatgactcttcgttctccgaatttcctaaccacaagttaatcacgagagtgagcctggatgaagcattacccaaaacgttttatgacatgtattcgccagatattctattagcagacccatccaacattctctgtaacgggcgtcccaagtttaccaagagagagttattggattgggatttaaacgatataagatcgttattgatagtcgagaagttaaggcccgaatggggtaatcaactaccggaagtaataacggtgggtgataatatgccccagtttaggttacaattattaccactatattctagcgatgagaccataatcgcaacgttagtccattcggatctgtacatggaggctaacttagattatgaattcaaactaaccagcgccaaatatacagtagcgaccgctagaaaaagacatgagcatataactggtagaaatgaagccgtcatgaatttgtcgaaaccggaatggagaaatatcatcgaaaattacctcttaaatatagcagtagaggcacaatgcaggtttgatttcaaacaaagatgctccgaatataagaaatggaagttacaacagtccaacttaaaaagaccggacatgcccccaccaagcataataccgcggaaaaacagcacagaaacaaaatcgcttctgaaaaaggctttattgaagaacattcagttgaaaaaccccaataataaccttgatgaattgatgatgagatcaagcgccgcaacaaatcaacagggaaaaaacaaagtcagcttatctaaagaagaaaaggctacgatatggtcgcaatgtcaggcacaagtttaccaaagattaggattggattggcagccggattcagtatcctga

SEQ ID NO: 149 - protein, 557 aa, Saccharomyces cerevisiae
MPIPVGNTKNDFAALQAKLDADAAEIEKWWSDSRWSKTKRNYSARDIAVRRGTFPPIEYPSSVMARKLFKVLEKHHNEGTVSKTFGALDPVQISQMAKYLDTIYISGWQCSSTASTSNEPGPDLADYPMDTVPNKVEHLFKAQLFHDRKQLEARSKAKSQEELDEMGAPIDYLTPIVADADAGHGGLTAVFKLTKMFIERGAAGIHMEDQTSTNKKCGHMAGRCVIPVQEHVNRLVTIRMCADIMHSDLIVVARTDSEAATLISSTIDTRDHYFIVGATNPNIEPFAEVLNDAIMSGASGQELADIEQKWCRDAGLKLFHEAVIDEIERSALSNKQELIKKFTSKVGPLTETSHREAKKLAKEILGHEIFFDWELPRVREGLYRYRGGTQCSIMRARAFAPYADLVWMESNYPDFQQAKEFAEGVKEKFPDQWLAYNLSPSFNWPKAMSVDEQHTFIQRLGDLGYIWQFITLAGLHTNALAVHNFSRDFAKDGMKAYAQNVQQREMDDGVDVLKHQKWSGAEYIDGLLKLAQGGVSATAAMGTGVTEDQFKENGVKK

SEQ ID NO: 150 - DNA, 3147 bp, Saccharomyces cerevisiae
agatcttcgaggagaacttctagcacgttgtttacatatctaatgttgtaacacggcctttgttatcttgtgaatatatccatcacctacgtcgcttgaggtttcgtatcaaagaaagagagttcaaacataatcatacgtgtttcactccaaatttgatcacaaatggccacccattatagcttgttattatttacttcttcttgagttcattttattgaaagatgccgctgggaacaaaacataaataaaattcaagagtacaatatagcgtagcatagttgcgagcaagggaaggcaacacagttaaaatgacaatgttagaaggaaaaactaaatcaagctcccataggaaatttcttgtgtcagtaatatgtctcgagaaaataataataattgaatctatttattgaaaagtaaatatctcgtaacccggatgctttgggcggtcgggttttgctactcgtcatccgatgagaaaaactgttcccttttgccccaggtttccattcatccgagcgatcacttatctgacttcgtcactttttcatttcatccgaaacaatcaaaactgaagccaatcaccacaaaattaacactcaacgtcatctttcactaccctttacagaagaaaatatccatagtccggactagcatcccagtatgtgactcaatattggtgcaaaagagaaaagcataagtcagtccaaagtccgcccttaaccaggcacatcggaattcacaaaacgtttctttattatataaaggagctgcttcactggcaaaattcttattatttgtcttggcttgctaatttcatcttatcctttttttcttttcacacccaaatacctaacaattgagagaaaactcttagcataacataacaaaaagtcaacgaaaaatgcctatccccgttggaaatacgaagaacgattttgcagctttacaagcaaaactagatgcagatgctgccgaaattgagaaatggtggtctgactcacgttggagtaagactaagagaaattattcagccagagatattgctgttagacgcgggacattcccaccaatcgaatacccatcttcggtcatggccagaaaattattcaaggtattagagaagcatcacaatgagggtacagtctctaaaactttcggtgccctagatcctgtccagatttctcaaatggcaaaatacttagacacaatctatatttctggttggcagtgttcatcaactgcttccacctcaaatgaacctggtccagacttagctgattatccaatggacaccgttccaaacaaagtggaacatttgttcaaggcccaattgtttcacgacagaaaacaactagaggcacggtcaaaggctaaatctcaggaagaactcgatgagatgggtgccccaattgactacctaacaccaattgtcgctgatgcagacgcaggccacggcggtttaaccgcagtcttcaaattgaccaagatgttcattgagcgtggtgctgctgggatccacatggaagaccagacatctacaaataagaaatgtgggcatatggcaggaagatgtgttatacccgttcaggaacatgttaacagattggtgactattagaatgtgtgctgatatcatgcattctgacttaattgtcgttgctaggactgattcagaagcagccactttgattagctcaaccatcgataccagagatcattatttcattgtcggtgccaccaatccaaatatcgagccatttgccgaagttttaaatgatgccatcatgagtggtgcatcaggacaagaactagctgacattgaacaaaaatggtgtagagacgctggactcaagttattccatgaagccgtcattgatgaaattgaaagatcagccctgtcaaataagcaagaattgattaagaaattcacctctaaagtgggtccattgactgaaacatcccacagagaagccaagaagctcgctaaagaaattcttggccacgaaattttcttcgactgggagctaccacgcgtaagggaagggttgtaccgttacagaggtgggacgcaatgttctatcatgagggcccgtgcatttgctccatatgctgatttggtatggatggaatctaactacccagacttccaacaggccaaggagtttgcagaaggtgttaaagagaaattccctgaccaatggctagcttacaacttgtctccatcctttaactggccaaaagccatgtccgttgatgaacaacacaccttcatccaaaggctgggtgatctaggttacatctggcaatttatcacattggccggtttacacactaacgctttagctgtccataacttctctcgtgactttgccaaggatgggatgaaagcttatgcccagaatgttcagcagagggaaatggacgatggtgttgatgtgttgaaacatcaaaaatggtctggtgcggagtacatcgatgggttattgaagttagctcaaggtggtgttagcgcaacagctgctatgggaaccggtgtcacagaagatcaattcaaagaaaatggcgtaaagaaataggacaaggattaaccattagaactgccggcatttcctgacaagtatatatattcgtaatctcaatgtatatttttttcatatataaacatgcgtacttaaaaacttaaactcatcgttactgcagtacaatgttctctaatggcatctctctaatggtactccaactaaagtcaacattctctccgtgcaagaatgcctttctctagttgcaaaaacgagtcaataaacatctttgatcgagtcgcctcatttttgttgactcggtgactaaaatcagtgccatttctgtccatgcctcgtgcgcgaatgattgaatcgaactaatcccgaacacaatcatagtatcgtatcgcccattagtgccgtgagtgtacgcgaggcaaaaggcaccatggaaaatattcccttagtcatcttggaaatcattgagactgtaaaggaactcgcaaacgggtaaccgatatttaccccacctttggtcgagaaattccacctgttcggcaatttttgccgctcttctcaagagcaaaaggcgtttttttttctgacacgcctcttctctcgcatgc

SEQ ID NO: 151 - protein, 554 aa, Saccharomyces cerevisiae
MVKVSLDNVKLLVDVDKEPFFKPSSTTVGDILTKDALEFIVLLHRTFNNKRKQLLENRQVVQKKLDSGSYHLDFLPETANIRNDPTWQGPILAPGLINRSTEITGPPLRNMLINALNAPVNTYMTDFEDSASPTWNNMVYGQVNLYDAIRNQIDFDTPRKSYKLNGNVANLPTIIVRPRGWHMVEKHLYVDDEPISASIFDFGLYFYHNAKELIKLGKGPYFYLPKMEHHLEAKLWNDVFCVAQDYIGIPRGTIRATVLIETLPAAFQMEEIIYQLRQHSSGLNCGRWDYIFSTIKRLRNDPNHILPNRNQVTMTSPFMDAYVKRLINTCHRRGVHAMGGMAAQIPIKDDPAANEKAMTKVRNDKIRELTNGHDGSWVAHPALAPICNEVFINMGTPNQIYFIPENVVTAANLLETKIPNGEITTEGIVQNLDIGLQYMEAWLRGSGCVPINNLMEDAATAEVSRCQLYQWVKHGVTLKDTGEKVTPELTEKILKEQVERLSKASPLGDKNKFALAAKYFLPEIRGEKFSEFLTTLLYDEIVSTKATPTDLSKL

SEQ ID NO: 152 - DNA, 2776 bp, Saccharomyces cerevisiae
tgtctaatgcgaaggtacttttatttttttcagattcaaagcaatattatttagacaattgatactaagtgagcttaaggaggattaaacaactgtggaatccttcacaaggattcaatatttgtttttcctggttattttgccatcattcaactttcctcagacgtaaaattcgtgcttagtgatgtctcaatattcccgcagggtaataaaattcaataactatcactatatacgcaacagtattaccctacattgctatcggctcaatggaaatccccatatcatagcttccattgggccgatgaagttagtcgacggatagaagcggttgtcccctttcccggcgagccggcagtcgggccgaggttcggataaattttgtattgtgttttgattctgtcatgagtattacttatgttctctttaggtaaccccaggttaatcaatcacagtttcataccggctagtattcaaattatgacttttcttctgcagtgtcagccttacgacgattatctatgagctttgaatatagtttgccgtgattcgtatctttaattggataataaaatgcgaaggatcgatgacccttattattatttttctacactggctaccgatttaactcatcttcttgaaagtatataagtaacagtaaaatataccgtacttctgctaatgttatttgtcccttatttttcttttcttgtcttatgctatagtacctaagaataacgactattgttttgaactaaacaaagtagtaaaagcacataaaagaattaagaaaatggttaaggtcagtttggataacgtcaaattactggtggatgttgataaggagcctttctttaaaccatctagtactacagtgggagatattcttaccaaggatgctctagagttcattgttcttttacacagaactttcaacaacaagagaaaacaattattggaaaacagacaagttgttcagaagaaattagactcgggctcctatcatctggatttcctgcctgaaactgcaaatattagaaatgatcccacttggcaaggtccaattttggcaccggggttaattaataggtcaacggaaatcacagggcctccattgagaaatatgctgatcaacgctttgaatgctcctgtgaacacctatatgactgattttgaagattcagcttcacctacttggaacaacatggtttacggtcaagttaatctctacgacgcgatcagaaatcaaatcgattttgacacaccaagaaaatcgtacaaattgaatggaaatgtggccaacttgcccactattatcgtgagaccccgtggttggcacatggtggaaaagcacctttatgtagatgatgaaccaatcagcgcttccatctttgattttggtttatatttctaccataatgccaaagaattaatcaaattgggcaaaggtccttacttctatttgccaaagatggagcaccacttggaagctaaactatggaacgacgtcttctgtgtagctcaagattacattgggatcccaaggggtacaatcagagctactgtgttgattgaaactttgcctgctgctttccaaatggaagagatcatctatcaattaagacaacattctagtgggttgaattgcggacgttgggactatattttctctacaatcaagagattaagaaatgatcctaatcacattttgcccaatagaaatcaagtgactatgacttccccattcatggatgcatacgtgaaaagattaatcaatacctgtcatcggaggggtgttcatgccatgggtggtatggctgcgcaaatccctatcaaagacgacccggcagccaatgaaaaggccatgactaaagtccgtaatgataagattagagagctgacaaatggacatgatgggtcatgggttgcacacccagcactggcccctatttgtaatgaagttttcattaatatgggaacaccaaaccaaatctatttcattcctgaaaacgttgtaacggctgctaatctgctggaaaccaaaattccaaatggtgagattactaccgagggaattgtacaaaacttggatatcgggttgcagtacatggaagcttggctcagaggctctggatgtgtgcccatcaacaacttgatggaagacgccgccactgctgaagtgtctcgttgtcaattgtatcaatgggtgaaacacggtgttactctaaaggacacgggagaaaaggtcaccccagaattaaccgaaaagattctaaaagaacaagtggaaagactgtctaaggcaagtccattgggtgacaagaacaaattcgcgctggccgctaagtatttcttgccagaaatcagaggcgagaaattcagtgaatttttgactacattgttgtacgacgaaattgtgtccactaaggcgacgcccactgatttgagcaaattgtgatctcccttgccccagtgtacacatatataaaaatatattcatgcctatatgattatgtatcggaatccaaaaacttatctttatattgcttcgtttcgtagttagcaatgaatcatcttatcatgattcctttttttgttttggccagattaatgtatcacggtcgacggcgaaggcatcaaccattgttgtggaatttcaaacacaatacttgatgactccaaacgtgggcatatattttgatttgaaaagaagtcgagaaagtatagcaacgcattgtatacgtttgaagctttcagcaaaggatataccgtggaa

SEQ ID NO: 153 - protein, 554 aa, Saccharomyces cerevisiae
MVKISLDNTALYADIDTTPQFEPSKTTVADILTKDALEFIVLLHRTFNSTRKQLLANRSNLQSKLDSGEYRFDFLPETEQIRNDPTWQGAIPAPGLINRSSEITGPPLRNMLVNALNAEVTTYMTDFEDSSSPTWENMIYGQVNLYDAIRNQIDFKTPRKEYRLKDDISRLPTLIVRPRGWHMVEKHLYIDDEPISASIFDFGLYFYHNAKELVKIGKGPYFYLPKMEHHMEVKLWNDIFCVAQDFIGMPRGTIRATVLIETLPAAFQMEEIIYQIREHSSGLNCGRWDYIFSTIKKLRNLPEHVLPNRDLVTMTSPFMDAYVKRLINTCHRRGVHAMGGMAAQIPIKDDPKANEAAMNKVRNDKIREMKNGHDGSWVAHPALAPICNEVFSNMGTANQIYFVPDVHVTSSDLLNTKIQDAQVTTEGIRVNLDIGLQYMEAWLRGSGCVPINHLMEDAATAEVSRCQLYQWVKHGVVLSDTGDKVTPELTAKILNEETAKLASASPLGEKNKFALAAKYFLPEVTGKIFSDFLTTLLYDEIIKPSAKPVDLSKL

SEQ ID NO: 154 - DNA, 2360 bp, Saccharomyces cerevisiae
cccgagaaggactgtgtggaagaacactacagcgatggcgacgtttgtattatcatctaattctgcgactgtgggcgaagtaaatatgtaaatgttcatgtattagtaatttcataggtttacgattatcgacataaaatctccgctgaaagttgcggtgcgatagaataccgcggattttggaaaattgcgtttgcttttcttatcacataaattgaatttcataagttttggcttatcttggataaggtacatcgtgaaagtatcacaaagattggatagtttcgtcaattggtgaagcaataagtataaaatggggacatttacgcatgtagtcttaattcttcactttctgtgcagttgatatcacttagagtatgtgtcataggcacggtaaagagcactgaacaatggtgaagataagcttggacaacactgctctatacgcagacatcgacacgactcctcaatttgaaccttccaaaactactgtagctgatattttaacaaaagatgccttagagttcattgttttgctgcatagaactttcaattcaacacggaaacagcttttagccaacagaagcaatttacaatcaaagttagactctggtgaataccgatttgatttcttgccggaaaccgaacaaatcaggaacgatcctacatggcaaggtgctatcccagcccctggtttgatcaacagatccagcgagattactgggccaccattgagaaatatgttagtcaacgatttgaatgctgaagtaacgacatatatgactgatttcgaggactcttcatctccaacttgggagaacatgatttacggacaagttaatctttatgatgccattagaaatcaaatcgatttcaagacaccaagaaaggagtacaggttgaaaggtgacatttcaagactgcccactttaattgtcagacctcgtggctggcacatggtggagaagcacctttacatagatgatgaaccgattagtgcttccatcttcgattttggtttatatttttaccataacgctaaagagttagttaaaattggtaaaggaccttatttttacttaccaaagatggagcaccatatggaggtaaaactatggaatgacatattctgtgttgcacaagattttattggaatgccccgcggtaccattagggccactgttctgattgaaactttgccagcggccttccaaatggaggagattatctatcaaataagagaacattcaagcggtttgaactgtggtcgttgggactacatattttcgaccattaaaaaactgagaaacttgaatgaacacgttttgccaaatagggatctagtgactatgacttcaccttttatggatgcttatgtgaaaagattgatcaatacatgtcaccgtagaggggtccatgcgatgggtggtatggctgcccaaatccccataaaagatgatccaaaggctaatgaagctgcaatgaacaaagttcgtaatgacaaaattagagaaatgaagaatgggcatgatgggtcatgggtagcacacccagcattggcaccgatttgtaatgaagttttcagtaacatgggtacagcaaatcaaatatattttgtcccggatgtacatgttacatcatctgatttattgaatacgaagattcaagatgctcaagtcactactgagggaatcagagtaaacttggatattggcctacaatatatggaggcttggttaaggggatctggttgtgtcccaattaatcatttgatggaagatgccgctactgcggaagtatcacgttgtcaattgtaccagtgggttaaacatggtgttgtcttaagtgataccggtgacaaagtaactccagaattgaccgctaagatattaaatgaagagactgcaaaattggcttcagcaagtccgctgggtgaaaagaacaagtttgccttggcagccaagtattttttgcctgaagtcactggtaaaatctttagcgacttcttgaccactttattgtatgatgaaattattaagccaagtgccaaaccagttgacttaagtaaattatagaatgtatacgtacataacctgacgaatattcgaagaattttaggcgctgttttaacgcataatccaatcaaatttgagctgataaggcctgataaggtatgacaaattgaactcatattttttctccatgccagatcatatttaagcctttgaagcgagaatatgtaaggaaactgaattactaattcttacctcaggaaaatcaaaagaacaaagaaaaactagctaagcaaattatcgaacgatggaaacaagaatacttgttgtgaatcctaatagttcgaa

SEQ ID NO: 155 - protein, 669 aa, Saccharomyces cerevisiae
MLRTRLSVSVAARSQLTRSLTASRTAPLRRWPIQQSRLYSSNTRSHKATTTRENTFQKPYSDEEVTKTPVGSRARKIFEAPHPHATRLTVEGAIECPLESFQLLNSPLFNKGSAFTQEEREAFNLEALLPPQVNTLDEQLERSYKQLCYLKTPLAKNDFMTSLRVQNKVLYFALIRRHIKELVPIIYTPTEGDAIAAYSHRFRKPEGVFLDITEPDSIECRLATYGGDKDVDYIVVSDSEGILGIGDQGIGGVRIAISKLALMTLCGGIHPGRVLPVCLDVGTNNKKLARDELYMGNKFSRIRGKQYDDFLEKFIKAVKKVYPSAVLHFEDFGVKNARRLLEKYRYELPSFNDDIQGTGAVVMASLIAALKHTNRDLKDTRVLIYGAGSAGLGIADQIVNHMVTHGVDKEEARKKIFLMDRRGLILQSYEANSTPAQHVYAKSDAEWAGINTRSLHDVVENVKPTCLVGCSTQAGAFTQDVVEEMHKHNPRPIIFPLSNPTRLHEAVPADLMKWTNNNALVATGSPFPPVDGYRISENNNCYSFPGIGLGAVLSRATTITDKMISAAVDQLAELSPLREGDSRPGLLPGLDTITNTSARLATAVILQALEEGTARIEQEQVPGGAPGETVKVPRDFDECLQWVKAQMWEPVYRPMIKVQHDPSVHTNQL

SEQ ID NO: 156 - DNA, 2010 bp, Saccharomyces cerevisiae
atgcttagaaccagactatccgtttccgttgctgctagatcgcaactaaccagatccttgacagcatcaaggacagcaccattaagaagatggcctattcagcaatcgcgtttatattcttctaacactagatcgcataaagctaccacaacaagagaaaatactttccaaaagccatacagcgacgaggaggtcactaaaacacccgtcggttctcgcgccagaaagatcttcgaagctcctcacccacatgccactcgtttgactgtagaaggtgccatagaatgtcccttggagagctttcaacttttaaactctcctttatttaacaagggttctgcatttacacaagaagaaagggaagcgtttaatttagaagcattgctaccaccacaagtgaacactttggacgaacaactggaaagaagctacaagcagttatgctatttgaagacgcccttggccaaaaacgacttcatgacgtctttgagagtacagaacaaagtcctatattttgcattaataaggagacatatcaaggaattagttcctatcatttacaccccaaccgaaggtgatgctattgctgcctattcccacaggttcagaaagccagaaggtgtgtttttagacattaccgaacctgattccatcgaatgtagattggctacatacggtggagacaaagatgtagactacatcgttgtgtcggattcggaaggtattctgggaattggtgaccaaggtatcggtggtgtacgtattgctatctccaaattggcattgatgacgctgtgcggtggtattcatcccggccgtgtgctacctgtgtgtttggacgtcggtactaacaacaagaaactagcccgtgacgaattgtacatgggtaacaagttctccagaatcaggggtaagcaatatgacgacttcttggaaaaattcatcaaggccgttaagaaagtgtatccaagcgccgttctgcatttcgaagatttcggtgttaagaacgctagaagattactagaaaagtacaggtacgaattgccatcattcaacgatgacattcagggcaccggtgccgtcgtgatggcctcgttgattgctgctttgaaacataccaacagagacttgaaagacaccagagtgcttatttacggtgccgggtctgcgggcctcggtatcgcagatcaaattgtgaatcatatggtcacgcacggcgttgacaaggaagaagcgcgcaagaaaatcttcttgatggacagacgtgggttaattctacaatcttacgaggctaactccactcccgcccaacacgtatacgctaagagtgatgcggaatgggctggtatcaacacccgctctttacatgatgtggtggagaacgtcaaaccaacgtgtttggttggctgctccacacaagcaggcgcattcactcaagatgtcgtagaagaaatgcacaagcacaatcctagaccgatcattttcccattatccaaccctactagactacacgaagccgttcctgccgatttaatgaagtggaccaacaacaacgctcttgtagctaccggatctcctttcccacctgttgatggttaccgtatctcggagaacaacaattgttactctttcccaggtatcggtttaggtgccgtactatcgcgtgccaccaccatcacagacaagatgatctccgctgcagtggaccaactagccgaattgtcgccactaagagagggcgactcgagacctgggttgctacccggcctggacaccatcaccaacacttctgcgcgtctagctaccgctgtgatcttgcaagcactcgaggagggaaccgcccgtatcgagcaagaacaagtaccgggaggagctcccggcgaaactgtcaaggttcctcgtgactttgacgaatgtttacagtgggtcaaagcccaaatgtgggagcctgtgtacagacctatgatcaaggtccaacatgacccatcggtgcacaccaaccaattgtag

SEQ ID NO: 157 - protein, 539 aa, Erwinia carotovora
MQINGITPQALAAYGIHDVRDIVYNPSYELLFKEERSPTLQGYERGIETQLGAVAVDTGIFTGRSPKDKYIVRDDVTRDTVWWSDQGKGKNDNHPLSQETWTHLKELVTTQLSGKRLFIIDAFCGANPDSRLSVRFVTEVAWQAHFVKNMFIRPSDEELEGFEPDFIVMNGAKCTNPNWQEQGLNSENFVAFNLTERIQLIGGTWYGGEMKKGMFSIMNYLLPLKGIASMHCSANVGEKGDVAVFFGLSGTGKTTLSTDPKRQLIGDDEHGWDDDGVFNFEGGCYAKTIKLSKEAEPDIFGAIKRDALLENVTVLADGAVDFNDGSKTENTRVSYPIYHIHNIVKPVSKAGHATKVILLTADAFGVLPPVSRLTSDQTQYHFLSGFTAKLAGTERGVTEPTPTFSACFGAAFLMLHPTQYAEVLVKRMKASGAQAYLVNTGWNGSGKRISIKDTRGIIDAILNGSIDDAEMQTLPVFDLAIPTSLPGVNPDILDPRDTYASIEQWQEKADDLAQRFITNFDKYTDAPAGAALVKAGPKR

SEQ ID NO: 158 - DNA, 1620 bp, Erwinia carotovora
atgcagatcaacggtattaccccgcaagccctagctgcttatggaatccatgatgtccgcgatattgtctacaatcccagctatgaactgctttttaaagaagaacgttcccctaccctacaaggctatgaacgcggcatcgaaacccaactgggtgcagtagccgtcgatactggcatctttaccggccgttccccgaaagacaaatacatcgtgcgcgatgacgttacccgcgacaccgtgtggtggtccgatcaaggcaaaggtaagaatgataaccacccattgagtcaggaaacctggacgcacctgaaagaactcgtcaccacgcaactgtccggcaagcggttgttcatcatcgatgctttctgtggcgccaatccagacagccgcctcagcgtgcgtttcgtgacggaagtagcctggcaggcgcatttcgtcaaaaacatgtttatccgtccgagcgatgaagaactggaaggttttgaaccggatttcatcgtgatgaacggtgcaaaatgcactaatccgaactggcaggaacaggggctaaactctgagaactttgtcgcgttcaacctgacggaacgcatccagctgattggcggcacctggtacggtggcgaaatgaagaaagggatgttctccatcatgaactacctgctgccgttaaaaggcatcgcctcgatgcactgctcggcaaacgtcggcgaaaaaggcgatgtggcggtcttcttcggcctgtccggtacgggtaaaaccacgctctctaccgatccgaaacgccaattgattggcgatgacgaacacggctgggacgacgatggcgtcttcaactttgaaggcggctgctacgccaaaaccatcaagctgtccaaagaagcagagccggatatcttcggtgccatcaaacgcgatgcgctgctggaaaacgtcaccgtgctggcagacggcgcagtggacttcaacgacggttccaaaacggagaatacccgcgtctcttacccgatctaccatatccacaatattgttaaaccggtctccaaagcaggtcacgcgaccaaagtgatcctcctgacggcggacgcgttcggcgtgttgccacctgtttctcgcctgacatccgatcagacgcagtatcacttcctgtccggctttaccgccaaactggcgggaactgagcgcggcgtgacggagccgacaccaaccttctccgcctgctttggcgcggcattcctaatgctgcacccaacgcagtacgctgaagtgctggtgaaacgaatgaaagcatcaggcgcgcaggcctatctggtgaataccggctggaacggcagcggcaaacgtatctcaatcaaggatacgcgagggattattgacgccattctgaatggcagcattgatgatgcagaaatgcagacactgccggtcttcgatttggcgatcccgacctcgctgcccggcgtcaatcctgacattctcgatccacgtgatacctacgcgagcatcgaacagtggcaggaaaaagcggacgatctggcccaacgctttatcaccaacttcgataaatacaccgatgcaccagcaggtgccgcgctggtgaaagcaggaccgaagcggtaa

SEQ ID NO: 159 - protein, 536 aa, Actinobacillus pleuropneumoniae
MLSRIEQELAQLGITNVKEIVRNPSYEQLFEEEMKPELEGFEKGRLTTSGAVAVDTGIFTGRSPKDKYIVYDETSKDNVWWTSDAVKNDNKPMNQATWQSLKELVTHQLSNKRLFVVDAFCGANKDSRVAVRIVTEVAWQAHFVKNMFVRPSEEELLNFVPDFVVMNGSKVTNPNWKEQGLNSENFVAFNLTEKIQLIGGTWYGGEMKKGLFSLMNYWLPLKGIASMHCSANVGAEGDVAVFFGLSGTGKTTLSTDPKRKLIGDDEHGWDDDGVFNYEGGCYAKTINLSEENEPDIYRAIRRDALLENVVVREDGSVDFADGSKTENTRVSYPIHHIDNIVEPVSKAGHAKKVIFLTADAFGVLPPVSKLTPEQTKYYFLSGFTAKLAGTERGITEPTPTFSACFGAAFLSLHPTKYAEVLVKRMEEAGSQAYLVNTGWNGSGKRISIKDTRGIIDAILDGSIEKAETKELPIFNLAIPTALPNVDPAILDPRDTYADKAQWQTKAEDLAGRFVKNFEKYTTNDEGKALVAAGPKL

SEQ ID NO: 160 - DNA, 1611 bp, Actinobacillus pleuropneumoniae
atgttaagtcgtattgaacaagaactagcacaattaggtattactaacgtaaaagaaattgtacgtaatccgagttatgaacaattattcgaagaagaaatgaaacctgaattagaaggttttgaaaaaggtcgtttaacgacatccggtgccgttgccgtagatacgggtatctttaccggccgttcgcctaaagataagtatatcgtatatgatgaaacatcaaaagataatgtttggtggacatcggatgcggttaaaaatgacaataaaccgatgaatcaagcaacttggcaaagtttaaaagagctggtaactcaccaattgtcaaacaaacgtttatttgtagtggatgcattctgcggtgcgaataaagacagtcgcgtagcggtacgtattgtcacggaagtggcgtggcaagcacactttgtgaaaaatatgttcgtccgtccgtcggaagaagaattgttgaattttgtgcctgatttcgttgtaatgaacggctcgaaagtaactaacccgaattggaaagagcaaggtttaaattccgaaaacttcgttgcgtttaacttaactgaaaaaatccaacttatcggcggtacttggtacggtggcgaaatgaagaaaggtttattctctctgatgaactactggttaccgcttaaaggcattgcgtcaatgcactgttctgcaaacgtgggggcggaaggtgatgtagcggtattcttcggtttatccggtacgggtaaaacaacgctttcgaccgatcctaaacgtaaattaatcggtgacgacgaacacggttgggatgatgacggcgtattcaactacgaaggcggttgttatgcgaaaaccatcaatctttccgaagaaaacgagccggatatctatcgtgcaatccgtcgtgatgcgttattagaaaacgttgtggtgcgtgaagacggttcggttgattttgcggacggttcaaaaaccgaaaatacgcgcgtatcttatccgatccatcatatcgataatatcgttgagccggtttcaaaagcgggtcatgcgaaaaaagtgattttcttaaccgcagatgcgttcggcgtgttacctccagtttctaaattaacgccggaacaaaccaaatattacttcttatccggttttaccgctaaattagcgggtaccgaacgtggcattaccgagcctacaccgactttctcagcgtgtttcggtgcggcattcttatcacttcacccgaccaaatatgcggaagtattagtcaaacgtatggaagaagcggggtcgcaagcatacttagtaaataccggttggaacggttcgggtaaacgtatttcgattaaagatactcgcggtattatcgatgcgattttagacggttcaattgaaaaagcggaaacaaaagaattaccgattttcaatttagcgattccgaccgcattaccgaacgtagatcctgcgatccttgaccctcgcgatacttatgcggataaagcgcaatggcaaactaaagcggaagatttagcgggtcgttttgtgaagaactttgaaaaatatactacaaatgatgaaggtaaagcgttagttgcggcaggtccgaaactttaa

SEQ ID NO: 161 - protein, 538 aa, Actinobacillus succinogenes
MTDLNKLVKELNDLGLTDVKEIVYNPSYEQLFEEETKPGLEGFDKGTLTTLGAVAVDTGIFTGRSPKDKYIVCDETTKDTVWWNSEAAKNDNKPMTQETWKSLRELVAKQLSGKRLFVVEGYCGASEKHRIGVRMVTEVAWQAHFVKNMFIRPTDEELKNFKADFTVLNGAKCTNPNWKEQGLNSENFVAFNITEGIQLIGGTWYGGEMKKGMFSMMNYFLPLKGVASMHCSANVGKDGDVAIFFGLSGTGKTTLSTDPKRQLIGDDEHGWDESGVFNFEGGCYAKTINLSQENEPDIYGAIRRDALLENVVVRADGSVDFDDGSKTENTRVSYPIYHIDNIVRPVSKAGHATKVIFLTADAFGVLPPVSKLTPEQTEYYFLSGFTAKLAGTERGVTEPTPTFSACFGAAFLSLHPIQYADVLVERMKASGAEAYLVNTGWNGTGKRISIKDTRGIIDAILDGSIEKAEMGELPIFNLAIPKALPGVDPAILDPRDTYADKAQWQVKAEDLANRFVKNFVKYTANPEAAKLVGAGPKA

SEQ ID NO: 162 - DNA, 2048 bp, Actinobacillus succinogenes
ttaatttctttaatcgggacgctatcgataaattgaaaatgcagcaatagaggaaacacggtttgtttgagtgaaaacagccgtgttttttcatttaccgccataaaaatttgaaacggatcacaaatcatgaaaaaaatacgttcaaattagaactaattatcgaaaatttgatctagttaacattttttaggtataaatagttttaaaatagatctagtttggatttttaattttaaattatcaatgaggtgaagtatgactgacttaaacaaactcgttaaagaacttaatgacttagggcttaccgatgttaaggaaattgtgtataacccgagttatgaacaacttttcgaggaagaaaccaaaccgggtttggagggtttcgataaagggacgttaaccacgcttggcgcggttgccgtcgatacggggatttttaccggtcgttcaccgaaagataaatatatcgtttgcgatgaaactacgaaagacaccgtttggtggaacagcgaagcggcgaaaaacgataacaaaccgatgacgcaagaaacttggaaaagtttgagagaattagtggcgaaacaactttccggtaaacgtttattcgtggtagaaggttactgcggcgccagtgaaaaacaccgtatcggtgtgcgtatggttactgaagtggcatggcaggcgcattttgtgaaaaacatgtttatccgaccgaccgatgaagagttgaaaaatttcaaagcggattttaccgtgttaaacggtgctaaatgtactaatccgaactggaaagaacaaggtttgaacagtgaaaactttgtcgctttcaatattaccgaaggtattcagcttatcggcggtacttggtacggcggtgaaatgaaaaaaggtatgttctcaatgatgaactacttcctgccgttaaaaggtgtggcttccatgcactgttccgccaacgtaggtaaagacggtgacgtggctattttcttcggtttatccggtacgggtaaaacaacgctttcgaccgatcctaaacgccaattaatcggtgatgacgaacacggttgggatgaatccggcgtatttaactttgaaggcggttgttacgcgaaaaccattaacttatctcaagaaaacgaaccggatatttacggcgcaatccgtcgtgacgcattattagaaaacgtcgtggttcgtgcagacggttccgttgactttgacgacggttcaaaaacagaaaatacccgtgtttcatatccgatttaccacatcgacaacatcgttcgtccggtatcgaaagccggtcatgcaaccaaagtgattttcttaaccgcggacgcattcggcgtattgccgccggtttcaaaactgactccggaacaaaccgaatactacttcttatccggctttactgcaaaattagcgggtacggaacgcggcgtaaccgaaccgactccgacattctcggcctgtttcggtgcggcattcttaagcctgcatccgattcaatatgcggacgtgttggtcgaacgcatgaaagcctccggtgcggaagcttatttggtgaacaccggttggaacggcacgggtaaacgtatttcaatcaaagatacccgcggtattatcgatgcgattttggacggttcaatcgaaaaagcggaaatgggcgaattgccaatctttaatttagcgattcctaaagcattaccgggtgttgatcctgctattttggatccgcgcgatacttacgcagacaaagcgcaatggcaagttaaagcggaagatttggcaaaccgtttcgtgaaaaactttgtgaaatatacggcgaatccggaagcggctaaattagttggcgccggtccaaaagcataaaactgtaaaagcatagtatgtgcatgattcggtaaactaccgaataaaatctgaaaaataaggctgagtatttccactcagccttttgttttggaaattagaagttgtttagaaagataaacggcgcggcttattcgtcgtattatttgggacataaaaaacccgttgataaa

SEQ ID NO: 163 - protein, 549 aa, Saccharomyces cerevisiae
MSPSKMNATVGSTSEVEQKIRQELALSDEVTTIRRNAPAAVLYEDGLKENKTVISSSGALIAYSGVKTGRSPKDKRIVEEPTSKDEIWWGPVNKPCSERTWSINRERAADYLRTRDHIYIVDAFAGWDPKYRIKVRVVCARAYHALFMTNMLIRPTEEELAHFGEPDFTVWNAGQFPANLHTQDMSSKSTIEINFKAMEMIILGTEYAGEMKKGIFTVMFYLMPVHHNVLTLHSSANQGIQNGDVTLFFGLSGTGKTTLSADPHRLLIGDDEHCWSDHGVFNIEGGCYAKCINLSAEKEPEIFDAIKFGSVLENVIYDEKSHVVDYDDSSITENTRCAYPIDYIPSAKIPCLADSHPKNIILLTCDASGVLPPVSKLTPEQVMYHFISGYTSKMAGTEQGVTEPEPTFSSCFGQPFLALHPIRYATMLATKMSQHKANAYLINTGWTGSSYVSGGKRCPLKYTRAILDSIHDGSLANETYETLPIFNLQVPTKVNGVPAELLNPAKNWSQGESKYRGAVTNLANLFVQNFKIYQDRATPDVLAAGPQFE

SEQ ID NO: 164 - DNA, 1650 bp, Saccharomyces cerevisiae
atgtccccttctaaaatgaatgctacagtaggatctacttccgaagttgaacaaaaaatcagacaagaattggctcttagtgacgaagtcaccaccatcagacgcaatgctccagctgccgttttgtatgaagatggtctaaaagaaaataaaactgtcatttcatcaagcggtgcattgatcgcttattccggtgttaaaaccggaagatctccaaaggacaaacgtattgttgaagaacctacctcgaaagacgaaatttggtggggtccggtcaataaaccatgttctgaaagaacatggtctatcaaccgtgaaagagctgcagattacttgagaacaagagaccacatttatattgtcgatgcatttgcaggatgggatccaaaatacagaatcaaagtccgcgttgtttgtgccagggcttaccacgctttattcatgacaaatatgcttattagacctacagaagaagaattagcccattttggagaacctgattttactgtctggaacgctggtcagttcccagccaatttacacacccaggatatgtcttcaaagagtactatagaaattaacttcaaagcaatggaaatgatcattttaggtaccgaatacgccggtgaaatgaaaaaaggtattttcacagttatgttttacttgatgcctgtgcaccataacgttttaactttgcactcttccgccaaccagggtattcaaaacggtgacgttactttattctttggcctaagtggtaccgggaaaaccactttatccgcagacccacatagattgttgatcggcgatgatgaacattgttggtccgaccatggtgtcttcaatatcgaaggtggttgttacgccaagtgtattaatttatctgccgaaaaggagcctgaaattttcgacgctatcaagtttggttctgtattagaaaacgttatctatgacgagaagtcgcatgtagtcgactatgacgactcttctattactgaaaatactagatgtgcctacccaattgactacattccaagtgccaagattccatgtttggcggactctcatccaaagaacattatcctgctaacttgtgatgcttcgggtgttttaccaccagtatctaaattgactcctgaacaagtcatgtaccatttcatctctggttacacttctaaaatggctggtactgagcaaggtgtcactgaacctgaaccaacattttcatcttgtttcggacaacccttcctagccttgcaccctattagatacgcaaccatgttagctacaaagatgtctcaacataaagctaatgcgtacttaatcaacaccggctggactggttcttcctacgtatctggtggtaaacgttgcccattgaagtacacaagggccattctggattctattcatgatggttcgttagccaatgaaacgtacgaaactttaccgattttcaatcttcaagtacctaccaaggttaacggtgttccagctgagcttttgaatcctgctaaaaactggtctcaaggtgaatccaaatacagaggtgcagttaccaacttggccaacttgtttgttcaaaatttcaagatttatcaagacagagccacaccagatgtattagccgctggtcctcaattcgagtaa

SEQ ID NO: 165 - protein, 500 aa, Saccharomyces cerevisiae
MSRLERLTSLNVVAGSDLRRTSIIGTIGPKTNNPETLVALRKAGLNIVRMNFSHGSYEYHKSVIDNARKSEELYPGRPLAIALDTKGPEIRTGTTTNDVDYPIPPNHEMIFTTDDKYAKACDDKIMYVDYKNITKVISAGRIIYVDDGVLSFQVLEVVDDKTLKVKALNAGKICSHKGVNLPGTDVDLPALSEKDKEDLRFGVKNGVHMVFASFIRTANDVLTIREVLGEQGKDVKIIVKIENQQGVNNFDEILKVTDGVMVARGDLGIEIPAPEVLAVQKKLIAKSNLAGKPVICATQMLESMTYNPRPTRAEVSDVGNAILDGADCVMLSGETAKGNYPINAVTTMAETAVIAEQAIAYLPNYDDMRNCTPKPTSTTETVAASAVAAVFEQKAKAIIVLSTSGTTPRLVSKYRPNCPIILVTRCPRAARFSHLYRGVFPFVFEKEPVSDWTDDVEARINFGIEKAKEFGILKKGDTYVSIQGFKAGAGHSNTLQVSTV

SEQ ID NO: 166 - DNA, 1503 bp, Saccharomyces cerevisiae
atgtctagattagaaagattgacctcattaaacgttgttgctggttctgacttgagaagaacctccatcattggtaccatcggtccaaagaccaacaacccagaaaccttggttgctttgagaaaggctggtttgaacattgtccgtatgaacttctctcacggttcttacgaataccacaagtctgtcattgacaacgccagaaagtccgaagaattgtacccaggtagaccattggccattgctttggacaccaagggtccagaaatcagaactggtaccaccaccaacgatgttgactacccaatcccaccaaaccacgaaatgatcttcaccaccgatgacaagtacgctaaggcttgtgacgacaagatcatgtacgttgactacaagaacatcaccaaggtcatctccgctggtagaatcatctacgttgatgatggtgttttgtctttccaagttttggaagtcgttgacgacaagactttgaaggtcaaggctttgaacgccggtaagatctgttcccacaagggtgtcaacttaccaggtaccgatgtcgatttgccagctttgtctgaaaaggacaaggaagatttgagattcggtgtcaagaacggtgtccacatggtcttcgcttctttcatcagaaccgccaacgatgttttgaccatcagagaagtcttgggtgaacaaggtaaggacgtcaagatcattgtcaagattgaaaaccaacaaggtgttaacaacttcgacgaaatcttgaaggtcactgacggtgttatggttgccagaggtgacttgggtattgaaatcccagccccagaagtcttggctgtccaaaagaaattgattgctaagtctaacttggctggtaagccagttatctgtgctacccaaatgttggaatccatgacttacaacccaagaccaaccagagctgaagtttccgatgtcggtaacgctatcttggatggtgctgactgtgttatgttgtctggtgaaaccgccaagggtaactacccaatcaacgccgttaccactatggctgaaaccgctgtcattgctgaacaagctatcgcttacttgccaaactacgatgacatgagaaactgtactccaaagccaacctccaccaccgaaaccgtcgctgcctccgctgtcgctgctgttttcgaacaaaaggccaaggctatcattgtcttgtccacttccggtaccaccccaagattggtttccaagtacagaccaaactgtccaatcatcttggttaccagatgcccaagagctgctagattctctcacttgtacagaggtgtcttcccattcgttttcgaaaaggaacctgtctctgactggactgatgatgttgaagcccgtatcaacttcggtattgaaaaggctaaggaattcggtatcttgaagaagggtgacacttacgtttccatccaaggtttcaaggccggtgctggtcactccaacactttgcaagtctctaccgtttaa

SEQ ID NO: 167 - protein, 506 aa, Saccharomyces cerevisiae
MPESRLQRLANLKIGTPQQLRRTSIIGTIGPKTNSCEAITALRKAGLNIIRLNFSHGSYEFHQSVIENAVKSEQQFPGRPLAIALDTKGPEIRTGRTLNDQDLYIPVDHQMIFTTDASFANTSNDKIMYIDYANLTKVIVPGRFIYVDDGILSFKVLQIIDESNLRVQAVNSGYIASHKGVNLPNTDVDLPPLSAKDMKDLQFGVRNGIHIVFASFIRTSEDVLSIRKALGSEGQDIKIISKIENQQGLDNFDEILEVTDGVMIARGDLGIEILAPEVLAIQKKLIAKCNLAGKPVICATQMLDSMTHNPRPTRAEVSDVGNAVLDGADCVMLSGETAKGDYPVNAVNIMAATALIAESTIAHLALYDDLRDATPKPTSTTETVAAAATAAILEQDGKAIVVLSTTGNTARLLSKYRPSCPIILVTRHARTARIAHLYRGVFPFLYEPKRLDDWGEDVHRRLKFGVEMARSFGMVDNGDTVVSIQGFKGGVGHSNTLRISTVGQEF

SEQ ID NO: 168 - DNA, 1521 bp, Saccharomyces cerevisiae
atgccagagtccagattgcagagactagctaatttgaaaataggaactccgcagcagctcagacgcacctccataataggtaccattgggcccaagacaaatagctgcgaggccattactgctctgagaaaagctggtttgaacatcattcgattgaacttttcccatggctcctacgaattccatcaatcagtaatcgaaaatgctgtgaaatcggaacagcaattccctggcaggccgctcgccattgccctggataccaagggtcccgagatcagaacaggtcgcacgttaaatgaccaagatctttatatccccgtagaccaccaaatgatctttaccactgacgcaagttttgcaaacacctccaatgataaaatcatgtatatagactatgctaacctgacaaaagttatcgttccggggagatttatatacgtggacgacgggattctctcttttaaagtgctccaaatcattgacgaatctaatttaagggtgcaagcggtaaactcgggttatatcgcatctcataaaggtgttaatctgcctaataccgacgttgatttgccccccttgtccgccaaagacatgaaggacttgcaattcggagtccgcaatggcattcacatcgtatttgcctctttcataagaacttcagaagatgtgttgtctatcagaaaagcgttgggttctgaagggcaagatatcaagattatatccaagatagaaaaccagcaagggttggataattttgacgaaatcctggaagtcacggatggtgttatgatagcgagaggcgatttaggaattgaaatcctggcacctgaagtattagccattcaaaaaaagctgattgcaaaatgtaatttggcgggcaaacctgtcatttgcgcgactcagatgctggattcaatgacacacaatccgagaccgacaagggctgaagtatcggatgtgggtaacgctgtgttggatggtgctgattgtgttatgctttctggagaaacggcgaagggtgattatccggtgaatgcagttaatattatggcggcgaccgctctgattgctgaaagtactatcgctcatttggctctttatgacgatctcagagacgccactcccaaacctacttccactacggaaactgtagcagctgcagctaccgcagcaatcttggagcaagatggtaaggccatcgttgtattatctactacagggaacacggcaaggctactgtcgaagtatagaccaagctgccctatcatattagtaacaagacacgcaagaacggcaagaattgcgcatttgtatagaggtgttttcccatttctgtatgaaccgaaacgcctagacgactggggtgaggatgttcataggcgcctaaagtttggtgttgaaatggcgaggtctttcggaatggtggacaacggtgatactgttgtttccattcaaggattcaaaggaggagtcggccattccaataccttacgcatttctactgttggtcaagaattctag

SEQ ID NO: 169 - protein, 640 aa, Saccharomyces cerevisiae
MLSLKKSALSKLTLLRNTRTFTSSALVRQTQGSVNGSASRSADGKYHIIDHEYDCVVIGAGGAGLRAAFGLAEAGYKTACISKLFPTRSHTVAAQGGINAALGNMHKDNWKWHMYDTVKGSDWLGDQDSIHYMTREAPKSIIELEHYGVPFSRTENGKIYQRAFGGQTKEYGKGAQAYRTCAVADRTGHALLHTLYGQALRHDTHFFIEYFALDLLTHNGEVVGVIAYNQEDGTIHRFRAHKTIIATGGYGRAYFSCTSAHTCTGDGNAMVSRAGFPLQDLEFVQFHPSGIYGSGCLITEGARGEGGFLVNSEGERFMERYAPTAKDLACRDVVSRAITMEIREGRGVGKKKDHMYLQLSHLPPEVLKERLPGISETAAIFAGVDVTKEPIPIIPTVHYNMGGIPTKWNGEALTIDEETGEDKVIPGLMACGEAACVSVHGANRLGANSLLDLVVFGRAVAHTVADTLQPGLPHKPLPSDLGKESIANLDKLRNANGSRSTAEIRMNMKQTMQKDVSVFRTQSSLDEGVRNITAVEKTFDDVKTTDRSMIWNSDLVETLELQNLLTCASQTAVSAANRKESRGAHAREDYPNRDDEHWMKHTLSWQKDVAAPVTLKYRRVIDHTLDEKECPSVPPTVRAY

SEQ ID NO: 170 - DNA, 2721 bp, Saccharomyces cerevisiae
aagcaaaatgataaatgtctgcccatcttaatttttagttacatatttacgttcgccatatgactttctcctgctcattttttgtgagggccagaaaaacacacatctggctaatgagaaaaaaaattggagaactaaggaaatgcctcgataaaaaattgaaagtaataaataaataaataaataaataaataaatagtaagttaataaataactaaataaatagagtatgtataagaagaaactttatgtaaatgtatattaataggtatatatacaaattagtgagtcagtggtaaaaaagtgcaaacgcacaaaaaaagtgcaattaaagaagagtatgatattcttttccgtaaaatacaatgaggttcaaattagtaggctcttacagttggaggtacggaaggacattccttttcgtccaaagtgtgatcgataacccttctgtatttcaaagtcactggggcagcgacgtccttttgccaggataatgtatgcttcatccaatgttcgtcatctctatttggataatcctctcttgcatgagcaccacgggattcctttctattagcagcggaaacagctgtttgggaggcacaggttaataagttctgtagctccagagtttcaaccaagtcagaattccagatcattgatctatcggtcgtcttcacatcatcaaaggtcttctctactgcagtaatgttccgaacaccttcatctaaagatgattgtgttctaaagacggaaacatccttttgcatagtttgtttcatattcattctaatttctgccgtagatcttgaaccattagcatttcttagtttatccaagtttgcgatggattctttacccaaatcagaaggtagtggtttgtgtggcaacccaggctgtaaagtgtcagcaaccgtatgggcaacagcacgaccaaagacaacaagatccaacaaggaattggcacctaatctattggcaccatggacagaaacacaagcggcttcaccacaagccattaaaccgggaataaccttgtcttcgccagtttcttcatcaatggttaatgcctcaccattccacttcgtgggaataccacccatgttatagtggacggtaggaataatgggaataggttccttggtgacgtctacaccagcaaaaatggctgctgtttcagagatacctggcaatctttcctttagaacttccggaggtagatggctcaattgtaagtacatgtggtcctttttcttaccaacacctctgccttctctgatctccatggtgattgctctggaaacgacatctctacaagctagatccttggccgtaggagcgtaacgttccatgaatctttcaccttcagaattaaccaaaaaaccaccttcaccacgagcaccttcagtgattaagcaaccagacccatatatacctgaaggatggaattgaacaaactctaaatcttgcaaggggaaaccagcacgcgaaaccatggcattaccgtcacccgtacatgtgtgagcagaggtacaagagaagtatgctctaccatagccaccagtggcaataatggtcttgtgtgctctgaatctgtggatggtaccgtcttcctgattataagcgatgacaccaacgacctcgccattatgggtcaacagatcgagggcaaagtactcaataaagaaatgtgtgtcatgtcttaaagcttggccataaagcgtgtgtaaaagagcatgtcctgtcctgtctgcgacagcgcatgttctataggcctgagcacccttaccgtactccttggtctgaccaccaaaggctctttggtagatcttaccgttttcagttcttgaaaaaggaacaccatagtgttccagttcaatgatcgatttgggcgcttccctggtcatgtaatggatggagtcctggtcacctagccaatcagatcctttcacagtatcgtacatatgccatttccagttatccttgtgcatatttcccagagcggcattgataccaccctgagcagcaacagtgtgggatctggtggggaaaagcttggatatacaagcagtcttgtagcccgcctcggcaagaccaaaggccgctctaaggccggcaccaccggcaccgattaccacacagtcatactcgtgatctattatgtggtacttcccgtctgcagatctggacgcggaaccgtttacagagccctgcgtttggcgcaccaaagctgacgatgtaaatgttcttgtgtttctgagcaaagtcaacttggagagcgctgatttttttagcgatagcatctttattctcgttcttcttcgtactatgaaattggatttttttctttctttctttctttctttttatcttcaataaggggttggggaggagattagtgaaaagaatatcgaaagtgcaaagtatactactggttagttataatgtgtctactagtttattagtgctatttaagcttcaagccgcctcgacgtggcaaaaggttagagtcgaggatgcctgaatatataacgggtttgagcaaacaaacaaccaatagaagaggcccggatcccttggtccagcgcttgctcggcgccgcgttctgcgctgtgattggtccacccccgccctcaaagccgtgactccataacgactttccagcgagcttggtacctggcaatagaggatgatcctcacctccgctacttttgggagctactt

SEQ ID NO: 171 - protein, 266 aa, Saccharomyces cerevisiae
MLNVLLRRKAFCLVTKKGMATATTAAATHTPRLKTFKVYRWNPDEPSAKPHLQSYQVDLNDCGPMVLDALLKIKDEQDSTLTFRRSCREGICGSCAMNIGGRNTLACICKIDQNESKQLKIYPLPHMFIVKDLVPDLTNFYQQYKSIQPYLQRSSFPKDGTEVLQSIEDRKKLDGLYECILCACCSTSCPSYWWNQEQYLGPAVLMQAYRWLIDSRDQATKTRKAMLNNSMSLYRCHTIMNCTRTCPKGLNPGLAIAEIKKSLAFA

SEQ ID NO: 172 - DNA, 1620 bp, Saccharomyces cerevisiae
caagtctgataattctgttttttagccctttttttttttttttcatggtgttctcttctcattgcttttcaattttaagttcgttacctttcatatagagtttcttaacagaaatttcacaacgaaaatataattaactacaggcatgtaaatataaaaacagtcctttaataataaaccttaagcattacgcgtgtattaatataataaatagttataaattgaataaataggggagagaagccaaaaggcccttcaaaaacaaagatataaattcatccttaaaaacaacaatacctgaagatactagaacaccttgtcgcctatgatggacatatatacagaccgggtcatagcattgccaatgataaataaataatagtcatagagagtaaacataaacgcctaacgtataggaatgtgtgagaatggtgagtttcgtccttgaaaataataataataatagttggtgcttttattagtgccaaaatcatttgagaggcttctgagttcttcggggctagctgtttttctgatagtctaggcaaatgccaaagatttcttaatttcagcaatagccaaaccaggattcaagccctttggacaagttctagtacagttcatgatggtgtgacatctgtacaatgacatggagttgtttagcatggcctttcttgtctttgtagcttggtctctagagtcaattagccaacggtaggcttgcattagcacggcagggcccaaatactgttcttggttccaccagtacgatggacatgaagtagagcagcatgcacacagaatacattcgtaaagaccatccagtttcttacgatcttcaatactttgtagcacttccgttccatcctttggaaacgatgatctctgtaagtaaggttggatagatttgtattgttggtagaagttagttaaatcaggtaccaaatctttgacaataaacatgtggggtaatggatagatcttgagttgtttggattcgttctggtcgatcttacatatacaagctagcgtgtttctaccgccaatgttcatggcacatgaaccgcagataccttctctacatgatcttctaaaagttagggtagaatcctgttcgtctttgatctttaacagcgcatcaagtaccatgggcccacagtcattcagatccacttgatatgactgtaaatgaggtttagcacttggctcgtctggattccatctgtaaactttaaaagttttcaatctgggggtatgcgtagctgcagctgttgtggcagtagccatacccttcttcgtcaccaaacaaaaggccttccttctcaatagcacgttcaacatccctataaatatgtatactccagtatttcaagaaagtatagctcaactatattcctttcaatcccttcctttagcctaacattttttggcattctcatagaaagtcattaatccccttatataagtttgccctttttacaccggagctaattgggccaatgcgaggccgccttttgcgcgctgcggatatttctaaggcatggtcgtgcggagctacaataatacgattgaattatagctacatagtgtacaaaagcgggtatatactttcatatgtga

SEQ ID NO: 173 - protein, 198 aa, Saccharomyces cerevisiae
MSAMMVKLGLNKSALLLKPSAFSRAAALSSSRRLLFNTARTNFLSTSPLKNVASEMNTKAAIAEEQILNKQRAKRPISPHLTIYQPQLTWYLSSLHRISLVLMGLGFYLFTILFGVSGLLGLGLTTEKVSNWYHQKFSKITEWSIKGSFAYLFAIHYGGAIRHLIWDTAKELTLKGVYRTGYALIGFTAVLGTYLLTL

SEQ ID NO: 174 - DNA, 1604 bp, Saccharomyces cerevisiae
acagaaaatgaaaaaaaatgaaaaatcaatgaataagagggcttgagttccaggttctagaaatttccctcacttatatatatatatatatctatatacatatagttttgagtatatcataacaggattctctttcaatgaaacctatgttttccgcggcattgcagttaaaggatgttctagtggtgaaaaagagaagaaaagaattcaaagttttcctcccataagtatacctatactttttatctgtgattgaaagctgtataccaacagccttctatatattaccttgtataccattcagtagtcttaagcatcatctaacttttgaccaggtccattctgattggctgcggtagcccgctccgttttccgctctaagcgtttggtacttgtataaatgtgcactggcattatgatatcgagatccccgcatagaaatctcaggaccaaccaaaaattgccaatcacaagctctaagaataataaacgatgtctgcaatgatggtcaagttaggactgaataagtcggctctattactgaaaccctccgccttttcaagagcagctgccttgagctcctcgaggaggctgctttttaatacagctagaacaaacttcctttctacctcaccattgaagaatgtggccagtgaaatgaacaccaaagcggcaattgctgaagaacaaatattaaacaagcaaagagcaaagagacctatttctccacatctgaccatttaccagccacaattaacttggtacctgtcttctcttcaccgtatttcgttggtgcttatgggactaggtttctacttgtttactatactcttcggagtctctggtttattaggtcttggattgactaccgaaaaggtttctaattggtaccatcagaagttttccaagattaccgaatggtccatcaagggttcctttgcttacttatttgcaattcactatggtggcgccattagacacttgatctgggataccgctaaggaattgacattgaaaggcgtttacagaactggttacgctctcattggtttcaccgccgttctcggtacttatttattaactttatgattctttaaggcgacgcacctgtttctacacacaaatatatatatagccaattttatatatacgttcctatatatgacccaataccgcacttatttattctttaagatctttataacccaaaatgccgattaacacaaacctatatttactaggggcacattttttatttttttgcctttctgtaaaatacaatagagaaaataaaggaacaaacaagaggaaaaacaggaaaagatagcgcaagagtaatcatattcaacaaaatatcagtgattttttacagatatcaagataatttctttccggatacttattgaagctattatttgttactggcaagaaaaagcaaacataggcggtcatttttcttttgtataaagtaaatacaagaagaattattttcgaggaataactaggtgtgcagagatattaaggaacaaggaaagaagaaagaaaacaattcgaacaaaactttattattctagcactattttaaaaaactgtcttttggcaaa

SEQ ID NO: 175 - protein, 181 aa, Saccharomyces cerevisiae
MMLPRSMKFMTGRRIFHTATVRAFQSTAKKSLTIPFLPVLPQKPGGVRGTPNDAYVPPPENKLEGSYHWYMEKIFALSVVPLATTAMLTTGPLSTAADSFFSVMLLGYCYMEFNSCITDYISERVYGVWHKYAMYMLGLGSAVSLFGIYKLETENDGVVGLVKSLWDSSEKDNSQKIEAKK

SEQ ID NO: 176 - DNA, 1038 bp, Saccharomyces cerevisiae
atatgagtaaaacaccaagcgaggatgtttcattgtgcatccgtgttcttgatgatcacataactgtaaaagaataatacggcacgttaaatgttattttagaatatataaacaccttatgtgccataagcattgagccaatcgctgctgttttttttattccggggcaccttcggaagaacacaggcgcaatttagttatataaggagaagccctcgagcgatcaggggaccgactgcggatcgctttaaggcaaagatagaaggataaatatctgctttggaagatagtcgtatctaatttcccattctgttgttttcttgatctttcctacgctttcgactttcttcctacgcgctttataatagctatgatgttgccaagatccatgaaatttatgactggaaggagaattttccatactgccacagtaagggccttccagtctaccgctaagaagagcttaactatcccatttttgcccgtattaccccagaaaccaggtggtgttaggggcactcccaatgatgcctacgtccccccccctgagaataaattagagggctcataccactggtatatggaaaaaatctttgccttgtccgtcgttccattggctacgacggctatgctgacaaccggtccgttatccactgcagctgattctttcttttctgtcatgcttttgggatattgttacatggaatttaactcttgtatcaccgattatatttctgaaagagtttatggtgtttggcacaagtacgccatgtatatgttgggccttggttctgcggtctccctttttggaatctataaactagaaaccgagaatgatggtgttgttggtttagtaaaaagtctatgggattcttccgagaaagacaacagtcaaaagattgaagccaagaagtagataaatcaccacgaatcatttgttcggtcatgtaacatgcacatctatagcaacgacgtgtctcctatcttttgcttttaccttgttttccgccggtatattcctttgccatatttactagt

SEQ ID NO: 177 - DNA, 657 bp, Saccharomyces cerevisiae
cagtttatcattatcaatactcgccatttcaaagaatacgtaaataattaatagtagtgattttcctaactttatttagtcaaaaaattagccttttaattctgctgtaacccgtacatgcccaaaatagggggcgggttacacagaatatataacatcgtaggtgtctgggtgaacagtttattcctggcatccactaaatataatggagcccgctttttaagctggcatccagaaaaaaaaagaatcccagcaccaaaatattgttttcttcaccaaccatcagttcataggtccattctcttagcgcaactacagagaacaggggcacaaacaggcaaaaaacgggcacaacctcaatggagtgatgcaacctgcctggagtaaatgatgacacaaggcaattgacccacgcatgtatctatctcattttcttacaccttctattaccttctgctctctctgatttggaaaaagctgaaaaaaaaggttgaaaccagttccctgaaattattcccctacttgactaataagtatataaagacggtaggtattgattgtaattctgtaaatctatttcttaaacttcttaaattctacttttatagttagtcttttttttagttttaaaacaccagaacttagtttcgacggatt

SEQ ID NO: 178 - DNA, 1470 bp, Saccharomyces cerevisiae
cgccgggatcgaagaaatgatggtaaatgaaataggaaatcaaggagcatgaaggcaaaagacaaatataagggtcgaacgaaaaataaagtgaaaagtgttgatatgatgtatttggctttgcggcgccgaaaaaacgagtttacgcaattgcacaatcatgctgactctgtggcggacccgcgctcttgccggcccggcgataacgctgggcgtgaggctgtgcccggcggagttttttgcgcctgcattttccaaggtttaccctgcgctaaggggcgagattggagaagcaataagaatgccggttggggttgcgatgatgacgaccacgacaactggtgtcattatttaagttgccgaaagaacctgagtgcatttgcaacatgagtatactagaagaatgagccaagacttgcgagacgcgagtttgccggtggtgcgaacaatagagcgaccatgaccttgaaggtgagacgcgcataaccgctagagtactttgaagaggaaacagcaatagggttgctaccagtataaatagacaggtacatacaacactggaaatggttgtctgtttgagtacgctttcaattcatttgggtgtgcactttattatgttacaatatggaagggaactttacacttctcctatgcacatatattaattaaagtccaatgctagtagagaaggggggtaacacccctccgcgctcttttccgatttttttctaaaccgtggaatatttcggatatccttttgttgtttccgggtgtacaatatggacttcctcttttctggcaaccaaacccatacatcgggattcctataataccttcgttggtctccctaacatgtaggtggcggaggggagatatacaatagaacagataccagacaagacataatgggctaaacaagactacaccaattacactgcctcattgatggtggtacataacgaactaatactgtagccctagacttgatagccatcatcatatcgaagtttcactaccctttttccatttgccatctattgaagtaataataggcgcatgcaacttcttttctttttttttcttttctctctcccccgttgttgtctcaccatatccgcaatgacaaaaaaatgatggaagacactaaaggaaaaaattaacgacaaagacagcaccaacagatgtcgttgttccagagctgatgaggggtatctcgaagcacacgaaactttttccttccttcattcacgcacactactctctaatgagcaacggtatacggccttccttccagttacttgaatttgaaataaaaaaaagtttgctgtcttgctatcaagtataaatagacctgcaattattaatcttttgtttcctcgtcattgttctcgttccctttcttccttgtttctttttctgcacaatatttcaagctataccaagcatacaatcaactccaagctggccgct

SEQ ID NO: 179 - DNA, 402 bp, Saccharomyces cerevisiae
tagcttcaaaatgtttctactccttttttactcttccagattttctcggactccgcgcatcgccgtaccacttcaaaacacccaagcacagcatactaaatttcccctctttcttcctctagggtgtcgttaattacccgtactaaaggtttggaaaagaaaaaagagaccgcctcgtttctttttcttcgtcgaaaaaggcaataaaaatttttatcacgtttctttttcttgaaaatttttttttttgatttttttctctttcgatgacctcccattgatatttaagttaataaacggtcttcaatttctcaagtttcagtttcatttttcttgttctattacaactttttttacttcttgctcattagaaagaaagcatagcaatctaatctaagtttt

SEQ ID NO: 180 - DNA, 41 bp, Artificial Sequence
  Description of Artificial Sequence: Synthetic oligonucleotide
cacacactagtagtaacatgtctcactcagttacaccatcc

SEQ ID NO: 181 - DNA, 36 bp, Artificial Sequence
  Description of Artificial Sequence: Synthetic oligonucleotide
cacacctcgagttaagatgatgcagatctcgatgca

SEQ ID NO: 182 - DNA, 11 bp, Artificial Sequence
  Description of Artificial Sequence: Synthetic oligonucleotide
atccccaaaaa

SEQ ID NO: 183 - DNA, 32 bp, Artificial Sequence
  Description of Artificial Sequence: Synthetic oligonucleotide
cacaccgtctcaggggatgggggtagggtttc

SEQ ID NO: 184 - DNA, 20 bp, Artificial Sequence
  Description of Artificial Sequence: Synthetic oligonucleotide
gccaaggataatggtgttga

SEQ ID NO: 185 - DNA, 39 bp, Artificial Sequence
  Description of Artificial Sequence: Synthetic oligonucleotide
caccgtctcaccccaaaaaaaaagtaatttttactcgtt

SEQ ID NO: 186 - DNA, 20 bp, Artificial Sequence
  Description of Artificial Sequence: Synthetic oligonucleotide
gcagcaattagttggcgaca

SEQ ID NO: 187 - protein, 15 aa, Saccharomyces cerevisiae
EETLPPSPKKVIFTR

SEQ ID NO: 188 - protein, 10 aa, Saccharomyces cerevisiae
EETLPPSQKK

SEQ ID NO: 189 - DNA, 1636 bp, Actinobacillus succinogenes
ttctagaaacaaaatgactgatttgaataaactggttaaggaattaaacgatttgggactgacagatgtaaaagaaatcgtatataatccaagttacgagcaattattcgaagaagaaactaagccaggattagaaggatttgacaagggtacattgacgacactaggggccgtagcggtagatacaggaatttttactggcagatctcccaaagataaatatatagtgtgcgatgaaactacgaaagataccgtatggtggaatagcgaagcagcaaaaaatgataacaaaccaatgactcaagaaacatggaaaagcttaagagaattagttgctaaacaattatccggtaaaagactatttgttgttgaaggttattgtggtgcgagcgagaaacatagaatcggtgtgagaatggtgacggaggtagcttggcaagctcattttgttaaaaatatgtttataagaccaacagatgaagaattgaaaaactttaaagccgactttacagtcctaaacggtgctaaatgtactaatccaaattggaaggagcaaggtttaaattctgaaaatttcgtagcgtttaatattacagaaggaattcaattaataggaggtacatggtacggaggtgaaatgaaaaagggtatgttttcgatgatgaattatttcctaccgttaaaaggtgtagcatctatgcattgcagtgctaacgttggaaaggacggtgatgttgctattttttttggtttatccggcacaggaaaaacaaccctatcaactgacccaaaaagacagctaattggtgatgatgaacatggatgggacgaatcaggtgtctttaatttcgaaggtgggtgttatgcaaagacaattaatctatcccaagaaaatgaaccagatatttacggtgctattagaagagatgctttgttagagaacgttgtagtaagagctgacggttccgttgattttgatgatggctccaaaaccgaaaatactagagtatcttatccaatctaccacatagataacattgttagaccagtatctaaggccggacatgctactaaggtcatattcctaaccgcagatgctttcggtgttcttcccccagtaagtaagttaactcccgaacaaaccgaatactatttcctaagtggatttacagctaaattagccggcacagaaagaggcgtcacagaaccaactccaaccttctccgcttgttttggggccgcatttttgtcattgcatccaattcaatatgcagatgtattagtagaacgtatgaaagctagcggcgcagaggcttatttggttaacacaggatggaatggaacaggtaaaagaatttctattaaagacacaagaggaataattgacgctatattagatggaagtattgaaaaggctgaaatgggcgaactaccaatattcaacttagctatacctaaagctttaccaggggtagatccagcaattttagacccaagagacacgtatgcagataaagctcaatggcaagtaaaggcagaagacttagctaacagattcgtaaaaaatttcgtaaagtacaccgctaacccagaagctgctaaattggttggagctggacccaaggcctaactcgag

SEQ ID NO: 190 - DNA, 41 bp, Artificial Sequence
  Description of Artificial Sequence: Synthetic primer
cacactctagaaacaacatgcagatcaacggtattaccccg

SEQ ID NO: 191 - DNA, 35 bp, Artificial Sequence
  Description of Artificial Sequence: Synthetic primer
cacacctcgagttaccgcttcggtcctgctttcac

SEQ ID NO: 192 - DNA, 42 bp, Artificial Sequence
  Description of Artificial Sequence: Synthetic primer
cacactctagaaacaacatgttaagtcgtattgaacaagaac

SEQ ID NO: 193 - DNA, 36 bp, Artificial Sequence
  Description of Artificial Sequence: Synthetic primer
cacacctcgagttaaagtttcggacctgccgcaact

SEQ ID NO: 194 - DNA, 1516 bp, Brassica napus
ttctagaaacaaaatggaaaaattgcgtgaaatagttagagagggaagaagagttggcgaagaggatcccagaagaattgtacactcatttaaagttggagtcgcgttggttttagttagctcattttactactatcaaccatttggtccatttactgactactttggtataaatgcgatgtgggccgtaatgaccgtcgttgttgtttttgaattttctgtcggagctactttaagtaaaggattaaatagaggtgtcgcaactttagtcgcaggaggcctagcgttaggagcacatcaattggcttcattatcaggaaggactatagaacccattctattggctacttttgtatttgttacagcagcacttgctacctttgttcgttttttcccgagagttaaggctacatttgattatggaatgctaattttcattctaacttttagcttaatttccttatcccagtttagagacgaagaaatattagacttagctgaatcgagattatcaactgtattagttggcggggttagttgtattttaatttccatatttgtttgtccagtttgggccggtcaggacttacattcactattagtttcaaaccttgatactctaagccactttttacaagaattcggtgatgaatatttcgaagcgagaacatatggtaatattaaagttgttgaaaagagaagaagaaaccttgagagatacaaatcagtgctaaactcaaaatccgatgaagattccctagcaaatttcgcaaaatgggaaccaccacatggcaaattcggttttagacatccatggaaacaatatttagtcgtcgcagctttagttagacagtgcgctcatagaatagatgctttaaactcttatattaattcaaattttcaaatcccaatcgatataaaaaagaaattggaagaaccattcaggagaatgtcattagaatctggaaaagcaatgaaagaagcttcaattagtctgaaaaaaatgaccaaatccagcagttacgatatccatataattaatagccaatctgcatgcaaagccttatctaccttgttaaaatctggtatattaaacgacgttgagccattacaaatggtgagtttactaactacagtttctttattaaatgacatagttaacataacagaaaaaataagtgaatctgtgagagaattggcttccgctgctagattcaggaataaaatgaaacctactgaaccaagtgtttccctaaaaaagttagattcaggttctacaggatgtgcaatgccaataaattcaagggatggtgatcatgttgtaaccatattacttagtgacgatgataaagatgatatagatgatgacgatacttcaaatatagtactagacgatgacactattaatgaaaagtctgaagatggtgaaatacatgtacaaaccagttgtgtaagagaggtgggaatgatgcctgaacattcacttggtgtaagaatattgcaaatttaactcgag

SEQ ID NO: 195 - DNA, 1378 bp, Triticum secale
ttctagaaacaaaatggatattgatcatggaagagaaatagatggagaaatggtttctactattgcgtcatgcggcttgttattgcattccttattagcaggtttcgcaagaaaggtcggtggtgctgccagagaagatcccagaagagttgctcattcattaaaagttggtctagcattggctctagtttcagctgtttactttgtaacaccattattcaacgggttaggcgttagtgcaatttgggctgttcttaccgtagtcgtcgttatggagtttaccgtcggtgcaactttaagtaaaggtttaaatagagctttggcaactttagtcgcaggatgtattgctgtcggagcccatcaattagcagaattaacagaacgttgttcagatcaaggggaaccagttatgttgacagtattagttttttttgtcgcatcagcagcaacatttcttagattcattcccgaaatcaaagcaaaatatgactatggcgtaactatttttatactaactttcggtttagttgctgtttcgtcttacagagtggaagaacttattcaattagctcatcaaagattttacacaattgtcgtcggagtatttatatgtctatgcacaacggtatttttatttcctgtttgggccggagaggacgtccataaattagcttcatcaaatttagggaaattagcgcaatttattgaaggtatggaaacaaactgttttggcgaaaacaacatagctatcaatttagaaggaaaagattttttacaagtatacaaatcggttctgaattcaaaggccactgaagattctttatgcacttttgcaagatgggaaccaagacatggtcagtttagatttagacacccctggtctcaatatcaaaaattaggtacactgtgtagacaatgcgcatcatcaatggaagctttagctagttacgttattaccaccacaaagactcaataccccgcagctgcaaatccggaactttcttttaaagtcagaaaaacatgtcacgaaatgtctactcatagtgctaaagttttaagaggtttagaaatggcaatacgtacaatgacagtcccatacttagccaacaatacagtcgtagttgcaatgaaggccgccgagagattaagatcagaattagaagataacgctgcacttttacaggtaatgcatatggctgttactgctacgttacttgccgatttagtcgatagagtcaaagaaatcacagaatgtgttgatgttttagcaagattagcccattttaaaaatcctgaagatgcaaaatacgcaatcgttggtgctttaactagaggaatagatgatcctttgcctgatgtagttatattataactcgag

SEQ ID NO: 196 - DNA, 43 bp, Artificial Sequence
  Description of Artificial Sequence: Synthetic primer
cacactctagaaacaaaatgaatgtattagtctataatggccc

SEQ ID NO: 197 - DNA, 33 bp, Artificial Sequence
  Description of Artificial Sequence: Synthetic primer
cacacctcgagggtagactcttaactctgaacc

SEQ ID NO: 198 - DNA, 37 bp, Artificial Sequence
  Description of Artificial Sequence: Synthetic primer
cacactctagaatcagaatgagcgctaccgaatcttc

SEQ ID NO: 199 - DNA, 31 bp, Artificial Sequence
  Description of Artificial Sequence: Synthetic primer
cacacctcgagctattttggggtaacttttg

SEQ ID NO: 200 - DNA, 22 bp, Artificial Sequence
  Description of Artificial Sequence: Synthetic primer
caatagcgaaaccacaagcagc

SEQ ID NO: 201 - DNA, 23 bp, Artificial Sequence
  Description of Artificial Sequence: Synthetic primer
gtctcatcgctagaatatagtgg

SEQ ID NO: 202 - DNA, 19 bp, Artificial Sequence
  Description of Artificial Sequence: Synthetic primer
ctgtaacgggcgtcccaag

SEQ ID NO: 203 - DNA, 20 bp, Artificial Sequence
  Description of Artificial Sequence: Synthetic primer
ccttgggaatttggagctcc

SEQ ID NO: 204 - protein, 5 aa, Saccharomyces cerevisiae
VNAPP

SEQ ID NO: 205 - protein, 5 aa, Artificial Sequence
  Description of Artificial Sequence: Synthetic peptide
VNDPP

SEQ ID NO: 206 - DNA, 3609 bp, Yarrowia lipolytica
actagtaaatatgtctaatgttccagaaactaaagtagatccttcattgtccacaccagaggtccctagtcaaggtttacatagcagattggacaagatgagagctgattcatccatattgggaagtatgaacaaaatattagtggcaaatagaggtgaaatcccaattagaatctttagaaccgcccacgagttatctatgcagactgttgctatctatgcacatgaggacagattgtcaatgcacagattcaaggccgatgaggcttacgtaattggagacagaggaaaatatacacctgtccaagcatacttacaggtggacgagataatcgaaattgccaaggctcatggtgttaacatggtacacccaggatatggtttcttgtccgaaaatagtgagttcgcaagaaaagtcgaagaagctggaatggcctggattggtcctccacataacgttatagacagtgtcggtgacaaggtttcagcaagaaacttagctatcaagaacaatgtacctgtcgtgccaggaaccgatggtcctgttgaggacccaaaggatgccttgaaatttgtagaaaagtacggttatcctgtcattataaaagcagctttcggaggtggaggtagaggtatgagagttgtgagagagggagatgacatcgttgatgcctttaacagagcatccagtgaagctaagactgccttcggtaatggtacatgtttcattgaaagattcttagacaaaccaaaacatatagaggtacaattgttagcagatggacaaggtaatgtcgtgcacttgtttgaaagagattgctctgttcagaggagacatcaaaaggtagtcgaaatcgctccagccaaagacttacctgtcgaggtgagagatgcaattttggacgatgctgttagattagctgaagatgccaagtacagaaacgcaggaaccgctgagttcttggtagacgagcaaaatagacactacttcattgagataaacccaagaatccaggtcgaacatactattacagaggaaataaccggtatcgatattgttgccgcacaaatacagattgctgccggtgcaactttagagcaattgggattaacacaagacaaaatctcaactagaggttttgctattcagtgtagaataaccacagaagatcctgcaaagcaattccaaccagatactggaaaaatcgaagtctacagatctgctggaggtaatggagtaagattggacggtggtaacggatttgccggtgcaattatatcccctcactatgatagtatgttagtcaagtgctcatgttctggcaccacattcgagatagccagaagaaagatgattagagccttggttgagtttagaataagaggagtcaagactaatattccattcttattggcattattgacacatcctacctttatcgaaggaaaatgctggactacattcattgacgatactccatccttatttgacttgatgaccagtcagaacagggctcaaaagttattggcctacttagcagatttatgtgttaatggaacaagtataaaaggtcaggtaggtaaccctaagttaaagtctgaggtcgttatcccagtgttgaagaactccgaaggaaagattgtagattgtagtaaacctgacccagtcggttggagaaatatattagttgaacaaggtcctgaggctttcgccaaggcagtgagaaagaacgatggagttttggtaatggacactacctggagagatgctcatcaatcattattggctacaagagtcagaactaccgacttattggcaattgcaaatgaaacatctcacgctatgtccggtgcctttgcattagagtgctggggaggtgctacttttgacgttgcaatgagattcttgtatgaagatccatgggacagattaagaaagatgagaaaagcagtgccaaatatcccttttcagatgttgttaagaggtgctaatggagtagcctactcatctttgccagataacgcaatagatcatttcgtcaagcaagctaaagacaatggtgttgatatctttagagtgttcgacgccttaaacgatttggatcaattaaaggtaggtgttgacgcagtcaagaaagctggaggtgttgtggaagcaaccgtatgttatagtggagatatgttgaatcctaagaagaagtacaacttagagtattacttggactttgtcgatagagttgtagaaatgggcacccacatcttaggtattaaagatatggcaggaactttgaagccagctgccgcaaccaaattaataggtgctatcagagaaaagtatcctaatttgccaattcatgttcatacacacgactccgccggtactggagtggcatcaatggctgccgcagctgaggccggtgcagatgtcgttgacgtggcttctaatagtatgtctggaatgacctcccagccttcaataagtgccttaatggcaacattggaaggaaaattatctactggtttggacccagctttagtaagagaattggatgcctattgggcacaaatgagattattgtactcatgcttcgaggctgacttaaagggacctgatccagaagtctttcaacatgaaattcctggtggtcagttgacaaacttattgttccaagcccagcaagttggattaggtgagcaatggaaagaaactaagcaggcatatatcgctgccaatcaattgttaggagacattgtaaaagttaccccaacatctaaggtggtcggtgatttggcacagtttatggtttccaacaaattaagttacgacgatgtgataaaacaggctggttcattggattttcctggatctgtattagacttctttgagggtttgatgggtcaaccatatggaggtttcccagaacctttaagaactgaagcattaagaggacagagaaagaaattaaccgagaggcctggaaaatccttgcctccagtcgattttgcagctgttagaaaagacttagaagaaagattcggtcacatcacagagtgtgatattgccagttactgcatgtatcctaaggtatttgaagattacagaaagatagttgacaagtatggagatttgtcaattgtgccaactagattattcttggaagcacctaaaaccgacgaggaattttctgtcgaaatcgagcaaggtaagacattaatattggctttaagagctattggtgatttgtccatgcaaactggattaagagaagtttacttcgagttgaatggtgaaatgagaaagatcagtgtggaagataagaaagccgcagtagaaaccgtgtcaagaccaaaagccgaccctggaaacccaaatgaagttggtgcccctatggccggtgtagttgtggaagtcagagttcatgagggaacagaagtgaagaaaggtgatccagtagctgtcttatctgccatgaagatggaaatggttatttccgccccagtctcaggtaaagtaggagaggtcccagttaaggaaggtgactctgttgatggaagtgatttgatatgcaaaatcgtgagagcttaactcgagctagcgaagacaaccag

SEQ ID NO: 207 - DNA, 3612 bp, Aspergillus niger
actagtaaatatggctgcaccaagacaacctgaagaggccgttgatgacactgagttcattgatgaccatcacgatcagcatagagacagcgtacacaccagattgagagctaattcagcaataatgcaattccagaaaatcttagtcgccaacagaggtgagattccaataagaatctttagaaccgctcatgaattgtccttacaaactgtggcagtttatagtcacgaagatcatttgtctatgcatagacaaaaggccgatgaggcttacatgattggaaagagaggtcagtatacacctgtaggagcatacttagctatagacgaaatcgtcaagattgccttggaacacggtgtgcacttaattcacccaggttatggattcttgtcagagaatgcagaatttgctagaaaagttgaacaatccggtatggtattcgtcggacctaccccacaaactatagagagtttaggtgataaggtttctgccagacagttggcaatcagatgtgacgtgcctgttgtaccaggtacacctggaccagtcgaaagatacgaggaagtgaaggcttttaccgatacttatggtttccctattataatcaaggccgcatttggtggaggtggaagaggtatgagagttgtaagagatcaagctgaattaagagactcattcgagagagccacatccgaagcaagaagtgcttttggtaacggaaccgtgttcgttgaaagattcttggatagaccaaaacatattgaggtgcagttattgggtgacaatcacggtaacgtggtacacttatttgaaagagattgtagtgtgcaaaggagacatcaaaaggtggttgaaatagcccctgcaaaagatttgccagctgacgtaagagatagaatcttagctgacgccgtcaagttggcaaaatcagttaattacagaaacgctggaactgccgagttcttagtggatcagcaaaatagatattacttcattgaaattaacccaagaatacaagttgaacacaccatcactgaggaaattaccggtatagatatcgtagcagctcagattcaaatagccgcaggagctacattggagcagttaggtttgactcaagacagaatttccaccagaggtttcgcaatccaatgtagaattacaactgaagatcctagtaagggattttctccagacacaggaaaaatagaagtctatagatcagctggtggaaatggtgttagattagatggaggtaatggtttcgccggagcaatcattacccctcattacgattctatgttggtgaaatgcacttgtagaggttccacatatgagatcgccagaagaaaggtagtcagagccttagttgagtttagaatcagaggtgtgaaaactaacattccattcttgacctccttattgtcacaccctgtgtttgtggatggaacatgctggactaccttcatagatgacacaccagaattatttgcattggtcggttctcagaatagggctcaaaagttattggcctacttaggagatgttgcagtgaacggttccagtattaaaggtcaaatcggagagcctaagttgaaaggtgacattataaagccagtattacatgatgctgccggtaaacctttggatgtctcagttccagcaactaagggatggaaacagatcttagactctgaaggtcctgaggcttttgctagagccgtgagagcaaataagggatgtttgattatggataccacatggagggacgctcatcaatccttattggccactagagttagaaccatagacttattgaacattgcacacgagacaagtcatgctttagccaatgcatattcattggaatgttggggtggtgctactttcgatgtagcaatgagattcttatacgaggacccatgggatagattgagaaaattaagaaaagcagtccctaatatcccattccaaatgttgttaagaggagctaatggtgttgcctattcttccttgccagacaacgcaatataccacttttgcaagcaggctaagaagtgtggtgtggatattttcagagtatttgatgccttaaacgacgtcgatcaattggaagttggaatcaaagcagtgcatgctgccgaaggtgtagttgaggcaacaatttgctattcaggagatatgttaaacccttctaagaaatacaacttgccatactacttagatttggtcgataaggttgtgcagttcaaacctcacgtattaggtataaaggatatggctggtgtcttgaaaccacaagccgcaagattattgatcggaagtattagagaaagataccctgacttgcctatacatgttcatacacacgactccgctggtactggtgtagcttcaatgattgcatgtgctcaagccggagcagatgctgttgatgccgcaaccgactctttgagtggtatgacatctcagcctagtatcggagctatcttagcctcattggaaggtactgagcatgatccaggtttaaacagtgcacaagtgagagctttggacacatattgggcccaattaagattgttatactctccttttgaagcaggattgactggtccagatcctgaagtctatgagcacgaaataccaggtggacagttaaccaacttgatcttccaggcttcacagttaggtttgggacaacaatgggccgaaacaaagaaagcatacgagtctgctaatgacttattgggtgacgttgtgaaagtaactcctacctccaaggtcgttggtgacttagcccagtttatggtaagtaacaaattgacagcagaggacgttattgctagagccggagagttagattttccaggttcagtgttggagttcttagaaggtttgatgggacaaccatatggtggatttcctgagccattaagaagtagagcattgagagacagaagaaagttagataaaagacctggtttgtacttagaaccattggacttagctaagatcaaatcccaaattagagaaaattatggtgctgccactgagtacgacgtcgcaagttatgctatgtaccctaaggttttcgaagattataagaagtttgtggccaaattcggagacttgtcagtattaccaaccagatacttcttggcaaagcctgaaatcggtgaggagttccatgtcgaattagagaaaggtaaggttttgatattaaagttgttagctattggaccattgtctgaacagacaggtcaaagagaggtgttttatgaagttaacggagaagtgagacaggtgtccgttgatgataagaaggccagtgtggagaatactgcaagacctaaagctgaattaggtgactcatctcaggtgggagccccaatgtccggagtcgttgtagaaatcagagttcatgatggtttggaggtgaagaaaggtgaccctattgcagtcttatcagctatgaagatggaaatggttatatctgcacctcacagtggaaaagtgtcctcattgttagtaaaggaaggtgattctgtcgatggacaagacttggtttgcaaaatcgtgaaggcttaactcgagctagcgaagacaaccag

SEQ ID NO: 208 - DNA, 3420 bp, Nocardioides sp.
actagtaaatatgttttccaaagttttggtagctaatagaggtgagattgccataagagccttcagagctgcatatgaattaggagccagaactgtcgctgtctttccatacgaagatagatggtcagagcatagattgaaagccgacgaggcttacgagatcggagaaagaggacaccctgttagagcttacttggacccagaagcaattgtagcagtcgccataagagccggtgccgatgcagtgtatcctggttacggtttcttgtccgaaaacccagcattggccgaggcctgtgcaaacgctggtatcacatttgtaggtcctaccgccgatgtattgactttaacaggtaacaaagcaagagcaattgccgcagctaccgctgccggtgtccctactttagcaagtgttgaaccttctactgacgtggacgccttggtggaatcagccggagagttgccatacccattattcgtaaaggcagtggctggtggaggtggtagaggaatgagaagagttgatgcaccaggtcaattgagagaagcagttgagacatgtatgagagaagctgaaggtgcatttggcgaccctactgtattcatagagcaggctgtcgttgatccaagacatatcgaagtgcaagtattggcagacggtgaaggtcacgtaatgcatttgtttgagagagattgttccgtccagaggagacaccagaaagtgattgaaatcgcccctgctccaaacttagacccagagttgagagacagaatatgcgcagacgccgttagattcgctaaggaaatcggatacagaaatgccggtactgtcgagttcttattggacgcaaaaggaacctatcatttcattgaaatgaatcctagaatacaagtcgagcatacagtgactgaagaggtgacagatgtagacttagtacagagtcaattgagaatcgcttctggtgaaaccttagccgacttgggattatcacaagaaactgtaaccttgagaggagctgcattgcagtgtagaattactacagaggacccagctaacaactttagacctgacactggtgttatcacaacttacagatccccaggaggtggaggagtgagattggatggtggtactgtgtatactggtgccgaagtcagtgcccactttgattctatgttagctaagttgacttgcagaggtagaaccttcgagaaagccgttgagaaggcaagaagagctgtggccgagtttagaatcagaggtgtttcaacaaacattcctttcttgcaagccgtattggtggacccagacttttccagtggacatgttactacctctttcattgaaacacacccacaattattgcaagccagatcatctggtgacagaggaagcagattgttgcattacttagccgatgtgactgtgaatcaaccacacggtcctgcacctgtttccatcgaccctgttaccaaattgccagaggtgaacttagacgttcctgctccagatggtacaagacagttgttgttagatgttggaccagaagagtttgccagaagattaagagcacaaactggtgttgctgtaaccgatacaactttcagggacgcccatcaatcattgttagctaccagagtgagaacaagagatttgttagctgtagccggtcatgtcgcaagaactacccctcagttgtggtctttagaggcttggggaggtgccacatatgatgtagccttaagattcttagctgaggacccatgggagagattggcagccttaagacaagcagtgcctaacatctgtttgcagatgttattgagaggaagaaatactgtaggttacacaccttatccagccgatgttactcaagcattcgtcgaagaagctgccgcaaccggtattgacgtgtttagaatatttgatgctttaaacgatgtggagcaaatgaggccagccatagaggctgtaagagctacaggaactgccgtcgcagaagttgcattgtgttacacaggagacttatccgatcctgacgagacattgtatactttagattactatttggaattagccgatagaattgtagacgccggagcacacgtcttagctataaaggatatggcaggattattgagagtgccagctgccagaaccttagtcacagcattgagagacagattcgacttgccagttcatttgcacactcatgataccccaggtggacagttagctacattattggcagccattgacgccggtgtggatgctgtagacgccgcaactgctagtatggcaggaacaacatcacaacctccattgtctgcattagtttccgctactgatcatggacctagagaaaccggtttgagtttaggtgccgtgtcagcattggagccatattgggaagctacaagaagagtatacgcacctttcgagtctggattaccttccccaactggtagagtttatagacacgaaatccctggaggtcaattgtcaaacttaagacagcaagctatcgccttaggtttgggagagaaattcgagcaaatagaagatatgtacgcagctgccaacgacatattaggtaatgtggtcaaggttaccccatctagtaaggtagtaggtgacttagcattgcacttagtcgctgttggagccgaccctacagaatttgcagatgagccaggaaaattcgatattcctgactccgtaataggattcttaaatggagaattgggtgacccacctggaggttggccagaacctttcagaactaaggccttagctggtagaactcacaagcctcctgttgaggaattagacgatgaacagagagagggattggccggttcatctccaacaagaagaagaactttaaacgaattgttatttccaggtccaacaaaggagttcacagaaagtagattaagatatggtgacacttctgtgttaccaacattggattacttatatggtttgagaagaggagaagagcatgcagtcgaaatcgaagagggtaaaacattaatcttgggagttcaagccataactgaacctgatgaaagaggattcagaaccgtgatgacaactattaacggtcagttaagaccagtgagtgtcagagacagatcagttgccgctgaggttgctgccgcagaaaaggcagataccagtaaacctggacacgttgcagccccatttcaaggtgtggtgtctatcgttgtggaggaaggtcaacaggtagccgctggagacacagtagcaactatcgaagccatgaagatggaggcctcaataaccgcacctgttgccggaacagttgagagattggccttatctggtactcaagcagtagaaggaggtgatttggtcttagttttgtcctaactcgagctagcgaagacaaccag

SEQ ID NO: 209 - DNA, 1883 bp, Yarrowia lipolytica
ctggtgagacctctagaaaacatgaatgttttggtatacaacggtccaggttctacacctgaatcagtcaaacatgctacagagtccttaagaaagttgttaagtccatactattctgtgcacaatgttgatgcagaagtaattaagaacgagccttggaccgaatcaactgccttgttagtcatgccaggtggagctgacttgccttactgttccgacttaggtggtccaggaaataagttgataagaaactggatcagagccggtggaaaatacttaggattttgcgccggtggatactatggtgctcaaagagtggagttcgaggaaggtacagacttggaagttattggagatagagagttaagtttgtacggtggaaagtgtgtaggttctgcatataaaggttttgtctacgactcacatgccggagctagagcagttggtgtgaattggaagggttcccctttcaaatgctactttaacggaggtggagttttcgtaccaggtaaggatatggataccgaaaatactgaagtcgtggctgagtacagtcaggacacagaagttcctaactctggtagatcagccgtagtcaaaatgaatgttggagagggtagagcagtgttatccggtatacacccagagtttaacccatccatgatgaagaaaggagatcaacatatcgacgctgttattgaagagttggaaaacttcgaaaaggagagattagccttcttgagacacttaatgaccttgttaggtttgaaaactaatccagatacaaccgatatgactttaacatctttgtatgtaactggaaacggtgtcgcaaaattattgaaggacttagatgtgtcagaagaaaatagagttttctctgctcctaacgacaccttcttctttggtgagaaaccatccggagatagtaatcatacacatgtaataccaatggtcggtgatgttcctgcctcagaattgactccacactttgaccataagttatactatcagtctttgagagcacctgaattaggatcaactttgttatacggagaggtgttgacaagtacttcaacattattggataagaactacaacttattgagacacttaccaaacggtttcaccgctgttggaacggtacaattgtctggtagaggtagaggaaataatgtctgggttaaccctatcggtgtgttagccgtatccacagtcttgagaattaactttaacccattcggtcaaaatacgagtattatatttgttcagtacttagcatcattggctatggtgcaagcaatcaagaactatggacctggttattctgaagttccagtgaaattaaagtggcctaatgacatctacgcagctaacccaggctccgagatggtcggtagtaccgatgcttatttgaaaataggtggagttatcgtgaactctaacgtattcgatggtcaatacatgttagtcgttggttgtggagtgaatgttacaaatagtgcccctactacctccttgaacatgttaattaattcaatgaacgaaaagaatggtacaactttggaacattatagaaccgaggtattattggcaaaattcttagaaacattcgaagctatgatggacgcctttaagaaccacggattctctatatttgagccattgtactatagttcttggttacatcaggatgcacaagtcagattggaacattacggtaatgttaaagctactgtgaaaggtatctccatggaccagggaatgttattggtacaagaagagggttcaggtagagtcattgaattacaacctgatggaaacagttttgatatgatgagaggtttgttaaagagaaaagagtaagtcgacggtctcagtcg

SEQ ID NO: 210 - DNA, 2135 bp, Aspergillus niger
ctggtgagacctctagaaaacatggctactccaaatatgacaggtaagaaggttaacgtattggtctattctggagcacctttatcaccattgctgcctgcccaacatcagagatacccatccttgtgtacccaaagaattataagaaatggtactacagtggaaagtgttagacacaccttatattctttgagaagattattggctcctcattacgcagtaatcccagtcacttcagatgccttattgcacgagccttggacagctacgtgcgcattattggtgattccaggaggtgccgacttaggttatggaagagttttgaacggaccaggtaatagaagaatagaacagtttgtgaaaagaggtggtgcttacttaggattctgtgccggtggttattacggctcccaaagatgcgagtttgaagtcggtgataagactttgcaagttatcggagaaagagagttagctttctatccaggtacatgtagaggtggagcctttgccggtttcgtgtaccatagtgaagctggtgccagagcagctgaaatttctgttaacaaagacatattgaatgccggaatcgtacctgagagattcagatgctattacaacggtggaggtgtgttcgtggatgcaccaaccttagctgacaagggtgttgaagtattggcctcatttgaagaggaattaaacgtggacccaggtgagggtaaagcagctgttgtgttttgcagagttggtgaaggaagagtagtcttgactggtccacacccagaatttgccgcagctaacttagataagaaagctggaggtcctgagtatacaaaggtgattgaagccttggaagcagacgataaagctagaactgacttcttaaaggcctgtttggtgaaattaggtttgcaagtaacccaatccacaactaccgtcccaagtttatcttcattgcacttatccagtcaagagcccgcagaaacagctgatttggttgcctcttggcaggaaatcatcaccaaagatggaaatgaggaaatcattaaagacgaaaatgatacctttagaatagagaggccaggtgcatggaacttatcacaattggaggactctttacctgagtccagtcagtcaaccgaaggtatcgtggattacaatgctattgttaaaagattggtagtccatgatgacgttccatcttccaagttaactccttactttaatcaccatgcattctacagtaatttgcaccaatatcaatcacagagcagagaaggagcttccgagtttggtgcccacttagtgtacggagaagtagtcacaagtactaacaccatattggaaaagaatccaaagttattgagaaaattacctaacggtttcacagcatcagctactacccaagttgccggtagaggaagaggttctaacgtgtgggtttccccagccggtgctttgatcttttcaacagtattaagacaccctttggagaagattcaatctgccccagtcgttttcattcagtacttagcagctatggccgtggtacaaggaatcaagaactatgatgccggttacagtgaattgcctgtcaagttaaagtggccaaatgacgtttatgctttggacccagaacatcctgagaagaaacagtactccaagatctgcggaatcttagtgaactcacattattgtgctaacgaatacatatctgttgtaggtatcggtattaatgccactaacgcaagtccaaccacatctttgactgctttagccgcaagattcttgggacctagagctgccccaataaccttagagaaattgttagcaagaattttgacaactttcgaagaattatacaccagattcttgagatccggtttcgatagatcatttgaggaaatgtactatgctgactggttacacatgcatcaagtcgttacattggaagaggaaggtggagtgagagccagaatcaaaggtattactagagattacggattattgttagcagaagagttgggttggaatgacagacctaccggtagagtatggcaattacagagtgattctaactcatttgatttctttagaggattggtcagaagaaaggtttaagtcgacggtctcagtcg

SEQ ID NO: 211 - DNA, 35 bp, Artificial Sequence
  Description of Artificial Sequence: Synthetic oligonucleotide
cacacctgcagccgcgggatttaaactgtgaggac

SEQ ID NO: 212 - DNA, 38 bp, Artificial Sequence
  Description of Artificial Sequence: Synthetic oligonucleotide
ctctcactagtttatgtatgtgttttttgtagttatag

SEQ ID NO: 213 - DNA, 37 bp, Artificial Sequence
  Description of Artificial Sequence: Synthetic oligonucleotide
cacacactagtaaaatatgagcagtagcaagaaattg

SEQ ID NO: 214 - DNA, 21 bp, Artificial Sequence
  Description of Artificial Sequence: Synthetic oligonucleotide
gacgttcccatggatcctcat

SEQ ID NO: 215 - DNA, 580 bp, Artificial Sequence
  Description of Artificial Sequence: Synthetic polynucleotide
ggtctcaccagtttttactcgttaattatattttatgacatctgaaaatactagctgtactatatatggcgtatattttatctagttatgttcccatgtatatttaaatgccaaatagaaagtaatcaaacactttcgatgaaatacgtgctaactgtgtttcttccttaatgctttcacttaccatgtctccattctccattttcttcttgagtgaaaatgtgagtttataacgctcaagtacgttaactactctatttaatatcgtacgggatttttgatcgactgtaggttttcttcttagaccattccagcggccgcaaattaaagccttcgagcgtcccaaaaccttctcaagcaaggttttcagtataatgttacatgcgtacacgcgtctgtacagaaaaaaaagaaaaatttgaaatataaataacgttcttaatactaacataactataaaaaaataaatagggacctagacttcaggttgtctaactccttccttttcggttagagcggatgtggggggagggcgtgaatgtaagcgtgacataactaattacatgactcgactgagacc

SEQ ID NO: 216 - DNA, 22 bp, Artificial Sequence
  Description of Artificial Sequence: Synthetic oligonucleotide
atgaatgaacaatattccgcca

SEQ ID NO: 217 - DNA, 20 bp, Artificial Sequence
  Description of Artificial Sequence: Synthetic oligonucleotide
ttagccggtattgcgcatcc

SEQ ID NO: 218 - DNA, 34 bp, Artificial Sequence
  Description of Artificial Sequence: Synthetic primer
cacaccgtctctctagacgcctctagcttgacgc

SEQ ID NO: 219 - DNA, 41 bp, Artificial Sequence
  Description of Artificial Sequence: Synthetic primer
cacaccgtctcactctggagcttgccactaaatccttaatc

SEQ ID NO: 220 - DNA, 40 bp, Artificial Sequence
  Description of Artificial Sequence: Synthetic primer
cacaccgtctcaagagatgtcaagtcaacttataccacat

SEQ ID NO: 221 - DNA, 34 bp, Artificial Sequence
  Description of Artificial Sequence: Synthetic primer
cacaccgtctcggtaccatttgcaattgggtagg

SEQ ID NO: 222 - DNA, 39 bp, Artificial Sequence
  Description of Artificial Sequence: Synthetic primer
cacactctagaaacaaaatgaactcctcgttcagaactg

SEQ ID NO: 223 - DNA, 32 bp, Artificial Sequence
  Description of Artificial Sequence: Synthetic primer
cacacctcgagctcgtttatttaggacctagc

SEQ ID NO: 224 - DNA, 39 bp, Artificial Sequence
  Description of Artificial Sequence: Synthetic primer
cacactctagaaacaaaatgtctctctctcccgttgttg

SEQ ID NO: 225 - DNA, 36 bp, Artificial Sequence
  Description of Artificial Sequence: Synthetic primer
cacacctcgagcgttacttgcggtcattggcaatag

SEQ ID NO: 226 - DNA, 1220 bp, Artificial Sequence
  Description of Artificial Sequence: Synthetic polynucleotide
ttctagaaacaaaatgtttaataacgagcatcatatacctcctggatctagccactcggatattgaaatgttaactcctcctaaatttgaagatgaaaaacaacttggacctgtcggtataagagaaagacttagacactttacttgggcttggtatacactaactatgagtgggggcggcttagctgttttaataatttcacaaccttttggtttcagaggtcttagggaaatcggaatcgctgtttatattctaaatcttatactttttgctttagtttgttccactatggctattaggtttatactacatggtaatttattagaaagtttgcgtcatgatagagaaggtttgttctttcccacattctggctttcagttgcaacaattatatgtggtttatcaaggtatttcggtgaagaatcaaatgaaagttttcagctagctttagaagctctgttctggatttattgcgtttgtacactattagtagctattatacaatattcattcgttttctcctctcataaatatggtctacaaactatgatgccatcttggatactaccagcttttcctataatgttgtcaggtactattgcgtctgttattggcgagcaacaaccagctagagcagctttacctataatcggagcaggtgtaacttttcaaggattaggtttttcaatttcttttatgatgtatgcacactatattggtcgtctaatggaatctggtttaccacactcagatcatagacctggtatgtttatatgtgttggtccaccggcctttacagcactagccttagtcggtatgtctaagggtttgcctgaagattttaagttattacatgatgcacacgccctggaagatggaagaattatagaactattagcaatctctgcaggtgttttcttatgggctttaagtttatggtttttttgtattgcaattgtcgccgttatcagatcacctcccaaagcctttcatttaaactggtgggctatggttttcccaaacactggtttcactttagcaacaataaccctaggtaaagcattaaactctaacggtgtaaaaggtgttggttcagctatgagtatttgtattgtatgtatgtatatattcgttttcgtaaataatgttagagctgtgatacgtaaagatataatgtaccctggtaaagacgaagatgtctctgattagtcttctcgag

SEQ ID NO: 227 - protein, 398 aa, Aspergillus oryzae
MFNNEHHIPPGSSHSDIEMLTPPKFEDEKQLGPVGIRERLRHFTWAWYTLTMSGGGLAVLIISQPFGFRGLREIGIAVYILNLILFALVCSTMAIRFILHGNLLESLRHDREGLFFPTFWLSVATIICGLSRYFGEESNESFQLALEALFWIYCVCTLLVAIIQYSFVFSSHKYGLQTMMPSWILPAFPIMLSGTIASVIGEQQPARAALPIIGAGVTFQGLGFSISFMMYAHYIGRLMESGLPHSDHRPGMFICVGPPAFTALALVGMSKGLPEDFKLLHDAHALEDGRIIELLAISAGVFLWALSLWFFCIAIVAVIRSPPKAFHLNWWAMVFPNTGFTLATITLGKALNSNGVKGVGSAMSICIVCMYIFVFVNNVRAVIRKDIMYPGKDEDVSD

SEQ ID NO: 228 - DNA, 37 bp, Artificial Sequence; identical to SEQ ID NO: 213
  Description of Artificial Sequence: Synthetic oligonucleotide

SEQ ID NO: 229 - DNA, 3592 bp, Artificial Sequence
  Description of Artificial Sequence: Synthetic polynucleotide
actagtaaatatgtctaatgttccagaaactaaagtagatccttcattgtccacaccagaggtccctagtcaaggtttacatagcagattggacaagatgagagctgattcatccatattgggaagtatgaacaaaatattagtggcaaatagaggtgaaatcccaattagaatctttagaaccgcccacgagttatctatgcagactgttgctatctatgcacatgaggacagattgtcaatgcacagattcaaggccgatgaggcttacgtaattggagacagaggaaaatatacacctgtccaagcatacttacaggtggacgagataatcgaaattgccaaggctcatggtgttaacatggtacacccaggatatggtttcttgtccgaaaatagtgagttcgcaagaaaagtcgaagaagctggaatggcctggattggtcctccacataacgttatagacagtgtcggtgacaaggtttcagcaagaaacttagctatcaagaacaatgtacctgtcgtgccaggaaccgatggtcctgttgaggacccaaaggatgccttgaaatttgtagaaaagtacggttatcctgtcattataaaagcagctttcggaggtggaggtagaggtatgagagttgtgagagagggagatgacatcgttgatgcctttaacagagcatccagtgaagctaagactgccttcggtaatggtacatgtttcattgaaagattcttagacaaaccaaaacatatagaggtacaattgttagcagatggacaaggtaatgtcgtgcacttgtttgaaagagattgctctgttcagaggagacatcaaaaggtagtcgaaatcgctccagccaaagacttacctgtcgaggtgagagatgcaattttggacgatgctgttagattagctgaagatgccaagtacagaaacgcaggaaccgctgagttcttggtagacgagcaaaatagacactacttcattgagataaacccaagaatccaggtcgaacatactattacagaggaaataaccggtatcgatattgttgccgcacaaatacagattgctgccggtgcaactttagagcaattgggattaacacaagacaaaatctcaactagaggttttgctattcagtgtagaataaccacagaagatcctgcaaagcaattccaaccagatactggaaaaatcgaagtctacagatctgctggaggtaatggagtaagattggacggtggtaacggatttgccggtgcaattatatcccctcactatgatagtatgttagtcaagtgctcatgttctggcaccacattcgagatagccagaagaaagatgattagagccttggttgagtttagaataagaggagtcaagactaatattccattcttattggcattattgacacatcctacctttatcgaaggaaaatgctggactacattcattgacgatactccatccttatttgacttgatgaccagtcagaacagggctcaaaagttattggcctacttagcagatttatgtgttaatggaacaagtataaaaggtcaggtaggtaaccctaagttaaagtctgaggtcgttatcccagtgttgaagaactccgaaggaaagattgtagattgtagtaaacctgacccagtcggttggagaaatatattagttgaacaaggtcctgaggctttcgccaaggcagtgagaaagaacgatggagttttggtaatggacactacctggagagatgctcatcaatcattattggctacaagagtcagaactaccgacttattggcaattgcaaatgaaacatctcacgctatgtccggtgcctttgcattagagtgctggggaggtgctacttttgacgttgcaatgagattcttgtatgaagatccatgggacagattaagaaagatgagaaaagcagtgccaaatatcccttttcagatgttgttaagaggtgctaatggagtagcctactcatctttgccagataacgcaatagatcatttcgtcaagcaagctaaagacaatggtgttgatatctttagagtgttcgacgccttaaacgatttggatcaattaaaggtaggtgttgacgcagtcaagaaagctggaggtgttgtggaagcaaccgtatgttatagtggagatatgttgaatcctaagaagaagtacaacttagagtattacttggactttgtcgatagagttgtagaaatgggcacccacatcttaggtattaaagatatggcaggaactttgaagccagctgccgcaaccaaattaataggtgctatcagagaaaagtatcctaatttgccaattcatgttcatacacacgactccgccggtactggagtggcatcaatggctgccgcagctgaggccggtgcagatgtcgttgacgtggcttctaatagtatgtctggaatgacctcccagccttcaataagtgccttaatggcaacattggaaggaaaattatctactggtttggacccagctttagtaagagaattggatgcctattgggcacaaatgagattattgtactcatgcttcgaggctgacttaaagggacctgatccagaagtctttcaacatgaaattcctggtggtcagttgacaaacttattgttccaagcccagcaagttggattaggtgagcaatggaaagaaactaagcaggcatatatcgctgccaatcaattgttaggagacattgtaaaagttaccccaacatctaaggtggtcggtgatttggcacagtttatggtttccaacaaattaagttacgacgatgtgataaaacaggctggttcattggattttcctggatctgtattagacttctttgagggtttgatgggtcaaccatatggaggtttcccagaacctttaagaactgaagcattaagaggacagagaaagaaattaaccgagaggcctggaaaatccttgcctccagtcgattttgcagctgttagaaaagacttagaagaaagattcggtcacatcacagagtgtgatattgccagttactgcatgtatcctaaggtatttgaagattacagaaagatagttgacaagtatggagatttgtcaattgtgccaactagattattcttggaagcacctaaaaccgacgaggaattttctgtcgaaatcgagcaaggtaagacattaatattggctttaagagctattggtgatttgtccatgcaaactggattaagagaagtttacttcgagttgaatggtgaaatgagaaagatcagtgtggaagataagaaagccgcagtagaaaccgtgtcaagaccaaaagccgaccctggaaacccaaatgaagttggtgcccctatggccggtgtagttgtggaagtcagagttcatgagggaacagaagtgaagaaaggtgatccagtagctgtcttatctgccatgaagatggaaatggttatttccgccccagtctcaggtaaagtaggagaggtcccagttaaggaaggtgactctgttgatggaagtgatttgatatgcaaaatcgtgagagcttaactcgag

1-551. (canceled)

552. A recombinant fungal cell having a genetic modification that decreases pyruvate decarboxylase (PDC) activity, wherein the recombinant fungal cell, when cultured under conditions that produce a C4 dicarboxylic acid, produces more of at least one C4 dicarboxylic acid than an otherwise identical fungal cell not having the genetic modification.

553. The recombinant fungal cell of claim 552 having a genetic modification that increases malate dehydrogenase (MDH) activity.

554. The recombinant fungal cell of claim 552 having modification selected from the group consisting of a modification that:
a. increases anaplerotic activity;
b. increases or decreases organic acid transport activity;
c. increases or decreases glucose sensing and regulatory polypeptide activity;
d. increases or decreases hexose transporter (HXT) activity; and
e. increases or decreases C4 dicarboxylic acid biosynthetic activity.

555. The recombinant fungal cell of claim 554, wherein the modification to increase anaplerotic activity comprises at least one modification selected from the group consisting of a modification that:
f. increases pyruvate carboxylase (PYC) activity;
g. increases phosphoenolpyruvate carboxylase (PPC) activity;
h. increases or decreases phosphoenolpyruvate carboxykinase (PCK) activity;
i. increases or decreases pyruvate kinase (PYK) activity;
j. increases biotin protein ligase (BPL) activity;
k. increases biotin transport protein (VHT) activity;
l. increases or decreases bicarbonate transport activity;
m. increases carbonic anhydrase activity.

556. The recombinant fungal cell claim 554, wherein the modification to increase or decrease C4 dicarboxylic acid biosynthetic activity comprises at least one modification selected from the group consisting of a modification that:
n. increases malate dehydrogenase (MDH) activity;
o. increases or decreases fumarase activity;
p. increases or decreases fumarate reductase activity;
q. increases or decreases malate synthase activity;
r. increases or decreases malic enzyme activity;
s. increases or decreases isocitrate lyase activity;
t. increases or decreases ATP-citrate lyase activity;
u. increases or decreases succinate dehydrogenase activity.

557. The recombinant fungal cell of claim 552 wherein the modification to decrease pyruvate decarboxylase (PDC) activity comprises at least one modification selected from the group consisting of a modification to decrease PDC1, PDC2, PDC5, or PDC6 activity.

558. The recombinant fungal cell claim 552, wherein the modification to increase or decrease glucose sensing and regulatory polypeptide activity comprises at least one modification selected from the group consisting of modifications to increase or decrease SNF1, MIG1, MIG2, HXK2, RGT1, SNF3, RGT2, STD1, MTH1, GRR1, YCK1, HXK1, and GLK1 polypeptide activity

559. The recombinant fungal cell of claim 552, wherein the genetic modification that increases or decreases glucose sensing and regulatory polypeptide activity does so by increasing or decreasing expression of a glucose sensing and regulatory polypeptide.

560. The recombinant fungal cell of claim 559 wherein the genetic modification that increases expression is the addition of a gene encoding a glucose sensing and regulatory polypeptide.

561. The recombinant fungal cell of claim 559 wherein the genetic modification that increases expression is a genetic modification that increases the transcription or translation of a gene encoding a glucose sensing and regulatory polypeptide.

562. The recombinant fungal cell of claim 559 wherein the genetic modification that decreases expression is the deletion of all or part of a gene encoding a glucose sensing and regulatory polypeptide or the disruption of a gene encoding a glucose sensing and regulatory polypeptide.

563. The recombinant fungal cell claim 554, wherein the modification to increase hexose transporter (HXT) activity comprises at least one modification selected from the group consisting of modifications to increase or decrease HXT1, HXT2, HXT3, HXT3, HXT4, HXT5, HXT6, or HXT7 polypeptide activity.

564. The recombinant fungal cell of any of claim 552, wherein the fungal cell comprises more than one modification selected from the group consisting of modifications to:
v. increase anaplerotic activity;
w. decrease PDC activity;
x. increase or decrease organic acid transport activity;
y. increase or decrease glucose sensing and regulatory polypeptide activity;
z. increase hexose transporter (HXT) activity; and
aa. increase or decrease C4 dicarboxylic acid biosynthetic activity.

565. The recombinant fungal cell of claim 554, wherein the more than one modifications are selected from the group consisting of modifications to:
bb. increase anaplerotic activity;
cc. decrease PDC activity;
dd. increase organic acid transport activity;
ee. increase glucose sensing and regulatory polypeptide activity; and;
increase C4 dicarboxylic acid biosynthetic activity.

566. The recombinant fungal cell of claim 552, wherein the fungal cell comprises more than two modifications selected from the group consisting of modifications to:
ff. increase anaplerotic activity;
gg. decrease PDC activity;
hh. increase or decrease organic acid transport activity;
ii. increase or decrease glucose sensing and regulatory polypeptide activity;
jj. increase HXT activity; and
kk. increase or decrease C4 dicarboxylic acid biosynthetic activity.

567. A method of producing a C4-dicarboxylic acid, comprising: culturing a recombinant fungal cell of claim 552 under conditions that achieve C4-dicarboxylic acid production.

568. The method of claim 567, further comprising a step of: isolating a produced C4-dicarboxylic acid.

569. The method of claim 568, wherein the C4-dicarboxylic acid is selected from the group consisting of malic acid, fumaric acid, tartaric acid, and succinic acid.

570. The method of claim 567 wherein the step of culturing under conditions that achieve C4-dicarboxylic acid production comprises culturing at a pH within the range of 1.5 to 7.

571. The method of any claim 567 wherein the step of culturing under conditions that achieve C4-dicarboxylic acid production comprises culturing under conditions and for a time sufficient for C4-dicarboxylic acid to accumulate to a level within the range of 10 to 200 g/L.

572. A method of preparing a food or feed additive containing a C4-dicarboxylic acid, the method comprising steps of:
ll. cultivating the recombinant fungal cell of claim 552 under conditions that allow production of the C4-dicarboxylic acid;
mm. isolating the C4-dicarboxylic acid; and
nn. combining the isolated C4-dicarboxylic acid with one or more other food or feed additive components.

573. The method of claim 572, wherein the C4-dicarboxylic acid is selected from the group consisting of malic acid, fumaric acid, tartaric acid, and succinic acid.

574. A method of preparing a polymer containing a C4-dicarboxylic acid, the method comprising steps of:
oo. cultivating the recombinant fungal cell of claim 552 under conditions that allow production of the C4-dicarboxylic acid;
pp. isolating the C4-dicarboxylic acid; and
qq. combining the isolated C4-dicarboxylic acid with one or more polymer components.

575. A method of preparing a C4-dicarboxylic acid derivative, the method comprising steps of:
a) cultivating the recombinant fungal cell of claim 552 under conditions that allow production of a C4-dicarboxylic acid;
b) isolating the C4-dicarboxylic acid; and
c) converting the isolated C4-dicarboxylic acid into a C4-dicarboxylic acid derivative.

576. The method of claim 575 wherein the C4-dicarboxylic acid is chosen from one or more of malic acid, fumaric acid, tartaric acid, and succinic acid.
